United States Patent Application Publication US 2008/0039413 A1 - sequence listing, part 17

SEQ ID NO: 2237 - DNA, 210321 bp, Homo sapiens
gctaaaggttaataataatcacaacaggcagcccatcattgcctccctgtctggctgagaggtttacaacttaaactcatggcagagggagaaattggctcaatcacttggagtaatggtacatggagagccagttgggcatgactgctatttaactcaaggaaaccaggctgctgcgcttaacgtacgtacacactaataaacatgtcatgctacgaggtgaaaattaccaccaccccctgcacaccctgcctcgctctccatttgcctgctcacctcactcccaacagaatgaacgagacgagcctgggagaacaggaccacaaacagctgcgctcagctgcaattagaagccaagaaacacaggtcatgcttcattcttttaaagagatttaaaattggccgggcacggtggctcacgcctgtagtcccagcactttgggaggccaaggtggatggatcacctgaggtcaggagttcaagaccagcctctttaaaatggcaaaaccccatctctactaaaaatacaaaaattagctgggcatagtggtgggtgcctgtaatctcagctactcgggaggctgaggcaggagaaccgcttgaacctgggaggcggaggttgcagtaagctgagatcacaccactgtactccagcctgggcaacagagcgacactccatctcaaaaaacaaagcaaaacaaaacaaaaataaaattaattacaatgccttactccaaatatttataatgttattttggaggaggagggtagaaagaaagagattacctgacaacactaatattacctgacgttttcagatcttttactgtgggccaggcactccttgagcattctcacagaaactttagtgaggtggatactctaattgtcctcagtttacaggcgagcacactgcaaatcagagagcttaagtaattttcctgagaccacccaggaccaatgtggtggacgtattgaatatagacccacctgattaaatcaaagcccaagctctcagcctttatgctacaaaggagcataaagtatttacggtacaaaggaggaagcggaagatgggaagatcactggcttgaccaaggtcttgaataggtccacattatgatgccttcctttctgcccccatccttgcacccatagaaacccagtcaggtagaagaggctgctaaggaaaaagaggctcgtaggagaacgggtaaactggaaactgtcaggatctttcctcatttgccctttggtcctgtccacacaggatgccccatgcatcacttcctcgtggtcaagtggatctggaggcctctccttgtcccaggtgaaatcccagctcaggtgttatatccttgctgcttctgacaaatgaaaccaaggtgtattaattaaggtaatgctagctactacaataagctgaaaaatatataatagctaaaagctagggttgccagatttaggaaaataaaaacaaacaaaaaacaattgaaatttgaatttcagataaacaatttttttagtataattatgtcccatgcaatatttgagacatactaaaaggttattcattgtttatctgatattcaaatttaacattttcattaatttattttatttggcagccctatggaagacatcaaaagtttatttcttatttatataaagtccaaaatagatgttttttagtaggcaggcagctcttctctaagcgtaattcagggctctgggttctgtccatcctggccctgacgtctttcattgctcagcttctaagatagctctatgctcatggggtcaagtcacaggaaagaaaagggaatgtggagttccacttgggagtttttatgggccagtcctggaagcggcacagaggatttctgctcacaatctattggccagaactcaatcacatggcctgcacctaactgcaagttaagccagaaaaatgtaggtgtgcccaggaagaagtttggggaacagctagccagtctctgccacacctggtaacagcagagtgaatctgtcagtactcgtgcctaatgcgtgtctcatatgctagtgctggattcagtcagcagtcctacatccgctggggtccctaggaggggtcagatgctctcctctttgccctgaactggttagctacttcggactgggatgacaaggccattgtgagagtgataagcaatgtgattcaaacaaattcatttcacttcaattcaatgcaggttttttttttttttttgagacgggctgtcatgctgttgccaaccctggagagcagtggcgccattacggctcactgcagcctcctgggctcaagcaattctccctcctcagcttcccaagtagctgggactacaggtgcatgccaccatgttcagctcatttattttttatttttttgtagacaggaggtctcactatgttacccaggctgctgtccaagtcctgggctcacgtgattctcccgcctcagcctcccaaaatgctgggattacaggcgtaagccaccatgcccagacaatttaataaatatttattaaaacttctaggatattgagaaaagcttggttctaggccactggggaagacatcaactgaaacagcccagttatactctcaattagctgtatacaattaaattcacagatatcctcaacccttatccatatcccattcatctttcaaaggttggtgaaaacctcatagcacaaagaattctgccctaaatgtttgaatacagaatggtcccctctctccctaattcctaaaatatttggtctctatgttcattcattcattcatgcatgcatgctttcagttagttcatcgacaaacatttacatctactctgtttgacagtgtgctaggctctggggcttgggagtggaaatactaaattgaacaagactgaggccttgccttccagaaactcacaaaggagtgggtggtcagaatgcacatgactcagtcagatataaggcagatggtggtaaatactatgataaatgttcagatagtgctaaggggcttatggagaatgggagaaattaaatctgactcaagggtgggtggagaagattacatccaagatccagcaatgacttccagaagagacaaatgaacctggcctggcaagggaggcagagtcaaagtgtctggctcaaagcccaccacagccttggctcacaggcatctcccggtcttccactcactcagtcctttcagggaaaggcactgagcttttctcaagggagaactccaaagacgtctttcatttcatcttacaaatccacacaaatttgcaattccactccacaagatacgagcatttgtcttgctataattttaatatgattggcataaattacctgttatcaagtaaaatagtttcttcttatggcttgtgtgcccctgacataccactgctatttgaaaagaggcttctccagaaactcagtgtctgagagtacgtgactggaaggtgagtgtttgcttaccccttgcgttttctccctgtcaggataaatggaatattctgctttaaggaccctaagtctggcaatatcatgttttgtgaacagccaacacagtaactatggttgaggcctgtattcgatgaatgaggttttcatatgcttctttcacatcaggagagagagagagaaaaaaaaataataaacttggtagaggacgtggagttgtatttctggactatggtggcacctctaaggagcatggttttccttttgcatggctttgtccattactataacactcctgttataaaatagctgccgtggattgaaatccataatgttaactcaaaagttaagcagtccgctattaaacagcataagaaactgttacctatcccctcttcctggccccccaacaaagaaacagcaaactgttaaaaaagcccatgtctccccatgaggacttggggttaattttcagcatggtgtctggggattcatctgtgggactcctattacccataataggactcatgctgcttcatttcatgcacacgatatggaaaatgcacccttccctagtgatgaaattttagttttgaaattgaggctagcttttgcagaacaaagcagattcccagaaacaccaaaaactattcaatgttggcctagagcctgtgtgtccgtgcttaggtgagtatgtgtatctgaaagggagaaaatgccttcctctaagtgcgtatgcccctctcaaagacaatattcaaatatcatgcccgatagctgacagcggtcaatggttgctatgcttcatcccaaagctttgttaggaaccccataaaacctggcacatggtttgtgacacccagtgaaacaccgtgcttcttccataatatcctgagccctgctgcctgtcattaagggacctctcttattaagcatctcttttttaaatggctgccatcatctggtcccagtgtacattaaatcccattataattataaacacacttccccataacattcgttgcagatctcaccctcagtgcctacccccttagggcatctttgcactaataacaactcagatttgctatctgagttgacaacattaggtcccaacaccatttgcaatatgctggggaaagagacagagagagaagaaaaagctttttcttccttaatcacgaagatcttggggtcacagtgacccaaggcctcaggagctaaaaaaaaaaaatccctcctcctacccttttgaaaagtcactctctactctacagatgagggaagggcatacttggcacctgggagagaaactcaagtttgtaaacaccactaaccaggtctctgttggttggggcggtgatggtggtggtagtggtggggtgggggatgagggatgatggcaatcactaatcaaagaagctgtcttatttggtttgctgagcctcaactaaccggaatgcatacatcacctgattctttccccctctgctttttggagggggcatctaaggacataatgtaaaagaattaaaatttaaaaacaaaaacaaaatgtcaacatatgcaggagtaaattccactctgcctaatttttttttttttttgaaatgagatcttgttctgtcacccaggctggagggcagtggtgcaatctcagctcactgcagccaccacctcccaggttcaagcgattctcccgcctcagccccctaagtagctggtattacaggcacgtgccaccacgcctggctaatttttgtatttttagtagagatagggtttcaccatgttggccaggctggtctcaaactcctgacctcaagtgatccgcctgcctcggcctcctaaagtgctgggagtacaggcatgagccactgcgcccagcctactctgcccaattgttgacatcacctacagctctatagtagatgtctggaatgatgatctgaaggactgtaagactgtaagattttttgactccagaaatggacacaataggcttgcggtgtcttcccctaacagtccctggcagggtaaaggtctgatgccctggtacgttccccagtggcaatctggagttctcaactgcagagaatacttttcctctactcaggggcgtcactacctgcatctctccctgaacatgcttcattttccactcatcacaagtttttggggaaatgcaaagtggcatcttctccccaaaaggtagggatctttgatttttttaatcacgatagaaaagtttactttgaaataaaaaaattaaatatatgttccaaattaagagttggaacttaaagagttgcaacattccattcatactcagatactcaaaacaccactgtattcttcttcctatctctttagttgaagtttttttttgtaattcaaagccccctccccaatttctgcctgagattctgagggaggaggaaaagtgtaagatcctgggggatctaagtctctttacctggtgaccaagctgagaaccatttggtcctcagcttggctggctgctgcacagatcttggcctcagcagagtaagagaagaaggaaaattaaaagcccttgcttccttcatctatttcactagaggctacataatctagaagttaagagcatgagctttgcagtcagaatggtctgatttaaagtttcagctctgatgtttaatagatctacagtctgcagtaaggcacttaatctctctgaacctcagttttcatgtccacagaaattgggaaaataatagcacctgcattaataggattgttatgtggattaaataaaacaacataggtaatgtgttgagtttcgtagtcagtgctcagaatgagttattattttcgctgtctccttcctgtatgatctcttagaactgctataccctcctgttccactaactgagctctgaaaggctgccagtggtgggaggtacatgggtaaagagggagatgagggagtaagatttagcaatggaattccatgcaaaggccagctcatctattcctctgtctctagcatgatctccccctaagattgagatctcctgtatttttagaactgatacccaggtttcccttaaaagacgcttcaagaaaaaatgtaaaagaaaaatcactctaaatacacgaacatgagagagacagaaagagagcgggcatgtgcgcgcgagagagattgagtattctcttgtaattttccatcctgcttgtttttaggtgctgccatatgaaatctctgaactgaggattctcatcagccttcccaggacccaaggacatagctctggctataaatggtgccagttttggtgggggagctgctgctgctttatctgggcccaataaaccttatcaaactgctgtgcagccagccttcagcgctaagtggaaatgcttggagcccaatgctggcattcagcccacagcctcgcctgccttcttcctttttgttaccttctccacctcttaaattcaggcattaatctctctttaacacttactaacaagggctgggcttttaatgggcagcgtttatgaagcaagggagattttcacatagagtgaatatggcacgggggtggggaggccagggccatagaggattgtgctttctctcccattgtttccagagattctctctttctctgatttgaggattaataggagattaggatcaggggttaattgtgtgcttctcctgctactgcactgaggagaggctggtaggtggatgtggacagcaaagcggaaacctccagcaggcactatctaggcagaagctcaacaagtgtagtgattctttcttctgtttccctggtgaggcaccaggagggtcttttctcctctccttacatccctccactcttgctctccttgcagcccagttctttcctaactttctttaaatccctttcctctaacagggtgtatagaccttagttagaaaaacaggtagtctctaaatgggattgctctttattgttaatgaaatgaatacccagggactgggcttcccctccgcttgccctgggtttgatgtggttgtatcccgtgctatcagaggagcccttccttcactcaagtgtgttcccctgcccagctctctccgcagactcctgctgggctgagctttccctgctcttaagagtcaggagtggctcttgctgggatggaatgacccgtctttggggctgcctcatgagcggctcttgtgaacccggatcagttccgatgtgtaaactctaccgcctggccttcagcgaacagatacagatttctgccaccttccatgaccctacagttcatgggactgggtctggggcagtgccagaggcacgcatggaggtgtgattctaggtgagtcctgcggaaaacctctggcccacccgtgagtcacggacagaacatgcagactcaggccttggtgacataagctccgcattgctaaaaccgcgtgacctcgagggctgactggcctgagaaccctggatggcgctctcggccacccccacctcccaccccaacctcctgggcttcggtcagaatccacagcccgtgcccgaagagcgcttcccgcctctggcaccctaccttcgctcagctccagggaaaaggggagagggcagctttctgcagtcagaggaagagtacattttctttggctgctctaccctctgaagtagggcggccagctgaaggaggacacacttttgaggggcccagaggttgtccaagcttccccctgccccctgaagactgtgcactgagctgggcgcagttctcgggaactgtttccacccagattgctggggggcgggggggtaggatgagggcagagccgagaggctgtccaaggtttgggagagagaaaagtttctcccaggactcgaccttggcctccagcaatcgcgacagctaaaaacgggtgtctcgcttcgacaatagatccccgcggaccttctggcacctggttcactagcgcccgcgaactctgcctcgggagacttattgaaatccggatgctcaagccgggaggcgcgcagtaaccaggaggatgagagggccgggtttgggctaggaaagcggccttttaaaacagatgtcagggggactgcagccccgagccatgagaaaaaagttaaaggcgagatgacacgcactgaattggggcaaacattggaagaggagacaaaactgcgtgcttgagcaccggggtgcggggagggggggacaaaacccgtatccagtgcaaattaaaatcttgggagtaggtgggggctgctgcgcgcccttcaccctcagttcccctattaaggattctgagtccccatgcactcctgtcctctggctccttccttcctctccgctcggccggtgagaggcggccgccggcgccccagcagcagctagatgtcaggcgaagcccggagcgcggagcgcggggaagggaggggaagggaggggaggggaaaggaggggtggggcggggagcgcgcgcgggctcggccagtgcggggtggtgggcgggctgagcccggggacggcgcgggaggggggagggaaggggggcagctgtgggcagggagccgggctcggccgccagcactaaagatggagaggcgccggggccttgcaggggagggggctcggcgttgacgtgggacgcggcggaggcgcagcagccggtggtgatttgctaacctcgcagcagagaggagttgagggcgatgagagcgggtactgcgaactgccgggcgatgctgtcgctgccgccgtgatacggagagcaacagttccccagcaacacccctccccgacacaggcacacaccccccgacaggcacgcacacccaccccacagtgcccggctcggctgcggtgagtgaggggccgggaagaggcgcaccgcccagcgagcgccgcgcgccggggcttcccggggctggagaggtctggggggcgcgcgctcgcttcggccactcggccgctgggcttgtgccttttttatttggcgtgttcccttcctgccgctgcagccgtcgccgccaccggttgggggtcggctagaagggggagccccggctgtcagcctgggcgcagctgcctccccagcccttcctcttcagggcacggtcggggtgagaggtggggggcgtagcggtgtgcgggggctgagggcgtgagcagaggggtcggggatccggaggctttgtaccgccaggggctggcggagcaacagagcccgtgggtgctcttatgtatgcggaccggtgcgcgggcgcaagataaggttgtggtttatttatttgtgtgtttattcgccggccggctgggaagctagaatcggaggagctgacgagtagatctgggggcggaggggagcaggactgggactgcttacgttttgtttctctttgagaaaacgtggtgggctttttcttgattggacttgatccccaccccccttttgcaggggagggagggaagctccagagggtctgcagcgctgcgggccctcctcggctctcggcgggaccggcggtgacaccggagctcgccgtgcgctcccggccgctctcggtgggtgccggtctctgcacctgatgcgttcgggatgcctttcccaccctggcgcgcccgccgctagctcgcacagcgcctcgcacactcccgcacgcgcttgaaatgcgcacggtcccgccggcccgcggaaccacccggacgcacggagcgctccgcaccgactcgctcgccgcctccccgagacgctcgcaccgtgcttgggccgggcgcgctggccgctggcgccgctggccagaggcctgggacccagccggtcgctcccagggggtcacggccctgggtcggagagggagggcgggcagaccccttctcgcctttcctcccacaactcgctgcggggcttttgtgcttccccttcgccgcggggcgggtccgcctcccctgccgctctcgccgcggagtccagcccgcccggactgtcgccgttcctccccgtctctttcgctttccctcgtccctagctcagctctccttctttcaggagtctagctcctcgggaaaagttgcttccccaagtttgctgaagtcgtctccaagtctcggtgggggtcgctgggaactgggggggtgtgagagcgcggtcgatccccggagctcgggcgggttatcgccggctcttccccgcgccgcctggctggacgctgcagccagcgccagccggatcgcgggcgccgagcggcgggtgggggagacggctgcccgtgggcgcccagatttccctcaggacccaaaaggcttgtttcagggcgccaagcttccattcttttggctgttccctcctagttctcagaaaccccgatgtctgcgggaaagcacgcggtggctcggctcggctgaatgctcatcccaaccttgacggcctccgtccccaccccggggcgggcagcaaaaatgtcttgaccagccgtcctgtgaatcctttctgcgtgagcttggtggctcctgaactgatagagctccttctgggggtggaggcaagcaagcagtgttcgaagagtgagggagagaccttgctgttccttgctctcagtgcattcactgcaatattggtcgctgtaagacagacacggggagggtcctgggcctgcgcggtctttctaacactcctttaagcgaggtttggagtctaggagccctcttattgatcccggacaggctctgggagaggcctttgtttcccagccctgtcttcccttcgtactggttgtaactcacaccacaggtgctggtgccaatatcacttccagcgcctctgagccatgtccagcatcccttgctgcccctggtcacaggacttgcagactccttggagcctgtgggacacacgtggagttcacacacccagcccagcatgagcactcctggctgtaggggaccatatttaactatggtctctctccataccttaatgacccatccttcttcgttttttagatcctcctgtccaccgggcagttgtgggcaggagggtaggtacgacaccttacgtaagtgtgtgtgtgtaaacacacacacactttttttttttttttctgagacggagttttgctcctgttgcccaggctggagtgcagtggcgcaatctcggctcacggcaacctccgcctcccggtttcaagtgattctcctgcctcagcctcccgagtagctgggattacaggcgggtgccaccgcgcctggctaattttgtattttttgtagagacggggcttctccatgttggtcaggctggtctcgaactcccgacctcaggtgatccgcctgcctgggcctcccaaagtgctgggattagaggcgtgagccaccgcgccctgccccacacactctttctgtctgtctctggctggtgtacatacacacagttcagattttatattatacatacaataactttgaggcttccgtgggtagaaatgacccaagttagtgtgtgggttgtgtgtgttcctgttagtacctagggatggggacaggccttgggtctgccagtgctttgcagccctgagaacagtagaaggccagaggccaaggctgatggtgagaggatagcctttgcggaggagagcccagtgtccatagatttctgtggccatggctacaggctcctggcctccaatgagtttgactctgcttctggggctcctgtagtgaggcagagtttggaaaaactgtttaaagataaggcttgacatccagggggctggcgtgaagctgacaaggaaggggctaaagtcttgctaattttaagtaagtgcacttcatcataatgaatgttggccttgcctagggagcccctactctcagacacagagaaagctgaggacttataggacttcactacaattttcatttcacttcatctaacagatgtcatagagtagtgaattaggcatctgctgtggcagaaccttctttttactctcagcatccctggcttgaaaggcagatttgtagatttctaggaagctacttcaattaaaatctctaagatcctcttgctaagggcttggcaacagggaggagggggcatgttgtagtggttgaattcttacttttagggacactgatgaatttgtcttttgttctctcatctcttttgcttcttcccctcttctttctcctagcctcctctattggcccaggaagcccacccagccccgccacgcagagcccagaaggaaagaaagcctcatgcctgagccgaggggagcaccatggatctgacaaaaatgggcatgatccagctgcagaaccctagccaccccacggggctactgtgcaaggccaaccagatgcggctggccgggactttgtgcgatgtggtcatcatggtggacagccaggagttccacgcccaccggacggtgctggcctgcaccagcaagatgtttgagatcctcttccaccgcaatagtcaacactatactttggacttcctctcgccaaagaccttccagcagattctggagtatgcatatacagccacgctgcaagccaaggcggaggacctggatgacctgctgtatgcggccgagatcctggagatcgagtacctggaggaacagtgcctgaagatgctggagaccatccaggcctcagacgacaatgacacggaggccaccatggccgatggcggggccgaggaagaagaggaccgcaaggctcggtacctcaagaacatcttcatctcgaagcattccagcgaggagagtgggtatgccagtgtggctggacagagcctccctgggcccatggtggaccagagcccttcagtctccacttcatttggtctttcagccatgagtcccaccaaggctgcagtggacagtttgatgaccataggacagtctctcctgcagggaactcttcagccacctgcagggcccgaggagccaactctggctgggggtgggcggcaccctggggtggctgaggtgaagacggagatgatgcaggtggatgaggtgcccagccaggacagccctggggcagccgagtccagcatctcaggagggatgggggacaaggttgaggaaagaggcaaagaggggcctgggaccccgactcgaagcagcgtcatcaccagtgctagggagctacactatgggcgagaggagagtgccgagcaggtgccacccccagctgaggctggccaggcccccactggccgacctgagcacccagcacccccgcctgagaagcatctgggcatctactccgtgttgcccaaccacaaggctgacgctgtattgagcatgccgtcttccgtgacctctggcctccacgtgcagcctgccctggctgtctccatggacttcagcacctatggggggctgctgccccagggcttcatccagagggagctgttcagcaagctgggggagctggctgtgggcatgaagtcagagagccggaccatcggagagcagtgcagcgtgtgtggggtcgagcttcctgataacgaggctgtggagcagcacaggtaggccccgctccagccccgcacctgatgtaggacttgaggccctcacacccctccttcacaccctggctgctcccaagttaggggcctggctcccctgtcttggcaatttgtgaaaaaaccagaacacttcttctaaagttctggcggggaggggagcaggttttttaaagtgtagtgagggggcctaggatctttccaaaaagcaccaggggacactcatgggcgcagcttcttaataggcccttccctttgttttttgcttttgggcccctgtttgttttttctgctgtttggtctgttctcctttgcttggagtgactgataaaatggagagaaggagaaaaggagtgggatgagggtctcttgggccctgcatctgaccatgttactaggtttcaggtcctcgggttcccatgcagtggtccctgtgaagacagcctgtccctttctgcagcttgggagaatgggagggtctgggggctgcttaagccacaagagcagctgcaggttctgaaccttattcctggtgaaagttaatctccttgctctgtctcccttctcattctctgatcctgcacatgcatttagggggaattgatttaaatgcaaggggaaaggatgggtataagagtcttggtcttgcagcctgtgaagtctcattcttatcccatctctgctcacactgaactaaatgccgcttcaggctagcattggcttccctccggcttccgtttccttctctatgaaataaccattcattgagctcttatgacatgtttggttcagtactaagcactttccatgagttgcattttcattacaacagccctttgagataggtaatgtccttcttttttttttggatgtgaagtttcgctctccttgcccaggctggagtgcaatggtgtgatctctgctcaccgcaacctctgcatcccgggttaaggtgattctcctgcctcagcctcccgagtagctcggattacaggcacgcaccaccatacctggctaattttgaatttttagtagagacgggctttcaccgtgttggtcaggatggtctcgaactcccgacctcaggtgatcggcctgcttcggcctcccaaagtgctggattacaggtatgagccaccgtgtccagctggtaatgtccttcttttacatggaacaatactaaggctcagatgtcaagtctcttttctagggtcacatagatagtaagaggcagagctggattcaaatttaggtccttaccccctggtactttgctgcctcttggagtcacttagacttgaagaggatcatgtctatggaacagagcgttttgaagattgcttataggaagtggagtaaataacaggggggataagtagcgagtttgttttttttttccttgcttctgtcataaaccacgtgcccatcattttatcctctagtttctgggtcagatgaatggagtcaagaaatccagctttctgttgtcattgacgacagcatttggctgcataccctgtggtctgctgttttgctgatcttgggtggattctccacttcctcccccttcacccccattcccctgttgctcgttcaggtacgggggatgtgagtgagaggggttggggtggggatatctggaagttgatctcatcacccctagccggaatctgctctgaccctgcctcctcgacagctcagaggcttaacttgtggaaagtgtggcagagctaaacgtagccgactttttccagtgggtgcgaaaaataaccgccactaaggtgtgtcttcttgatgcttgtaccgctcagaaatagactgaggttatgtttgtttttgctcaaactttcctaaagaggaaacccgctccccaaagttgaccagatagatgtatcatctttccggatgtgaattatttcggctgtgtgctatgagaactgggtatggtgggaagtaattgtttttctggctctcatcaggtcctggttcctggttgcttttctttacccgagagggccacaaaagataccactctcctgagacttccaagttccccttcagcaagaccctcattcctctggggagagagggagagttggccatgttatattcgaaagagcctgggtattggaattggccatatttagtggtgagagcctgtgatacttatttaacctttctgggccttgtttcactcactacatttttttttttttttttttttgagacggagtctcgctctgtcaccgggctggagtgcaatggcgtgatctcagctcactgcagtctccacctcccgggttcaagcgattctcctgcctcagcctcctgagtagctgggactacaggcacctgtcaccccgcccagctaattttttgtatttttagtagagacagggtttcaccatgttggccagaatggtctcgatctcttgaccttgcgatccatccacctcggcctcccaaagtgctgggattacagctgtgagccaccccgcccggccttcactcacttcttaaaatggagacggtcaacagggttggtgctgaattaatgaagtaagatccagaaatcactagagctgtgatgggcacatagtcaccgcagcggtggagaactgaccatctgtcccttgtgttgtttaggcctcatctctgcatggtcctcattggctctgagttctagtgtgtagtgtccacagtgccaccctccatgagggttgtgttgactgtgaggtggtgcagagaatgtccctgtccttgtgagcatatgacagcaagacactggccctggaatcctccgtgtcacatgtgggctgctgacaggaagaatgtgcttttgttgttgttgttgttgttgaggcagagtcttactctgtcgcccaggctgcagtgcagtggcatgatcttggctcactgcaacctctacttcccgggttcaagtgattctcctgcctcagcctcctgagcagctgggactacagatgtgtaccaccatgcccgactaatttttgtatttttagtagagatggggtttcaccatgttggtcaggctggcctggaactcctggccttaagtgatccacctgtctcggcctcccatagtgctgggattataggtgtgtgccaccctgctgggccgagaatgtgcttttgactgagggtggaaagtcagcagctgcagcccaagaagttagagccaggggcagtgcctttgatgggaagcttgggggtctaaagaaatcagaaaggggagaaaataatcctgcgtgtgctcagccctcactcagatcaacagcccctcgggtcccagctagatgtactttgtagaaggctttttttctccccctcaccctcaaaactccaggattaatgtgctattcccttttttctactgttctctgtctccccccaacccatcagcagtctgagaaatgctatggtggaaaaaaaaaaacaacagccctataaccagtacaaacaaaaagccaagacaaaaaaaaaaaaaaaaaatcagaaggggagattttgaggccaggaagccatggcattcactggaaatatatcagtgataaaataacaggctacagggtttattttattttatttttaagtcaataggcctgagtgttggtaaagactagatacccagcaatccttcttgcatttcttcttggggtcggggggcagaagggaatggagaggaaatgaaggcggattgctggtaagtgaggcaggaaggcagggagtttattatggaatgtcatcggtaagtttccccatgatttgatcccaagctggtgtggagtgaagggtaagctgttggctcaacagatagtgagaatcaaacttagtggagttgtagatcctgtttcctgcagcggacagcaagatgtacaagccgtccactgcaggaatgacgtgctgtaaaagggatgcagtgtcaagtgtagtcatggatgggtgggaagaccagacaaaggcatccaatgggactgacttacctaaacaaaccagaaggaagtcagaacagtgggaagatctgatagataagcagtattctgcaggcagatgaaggagcaagctttgggcccccaaatcttcaccagtgcatccacattacagaggataatgcctgagggaggggaagatcatctcaggattctggaacactgggccctccctttcttattccaaaaggctggagcagttctgcatgtaggcttctctggaaatggtctaggaaccagctcatccaggccaggagcacctgatcattctcagagttacgtacatatgcgataagattgcagggaacagtatagttctatagacttaagtgtgaacatagtcctcatttatagtccctagtctcccatggctcacgcagcttggtctttatgtgtttctgaatttagtgctgcagaggcacaatggggtctggtttctggatcttatacagacaagcacttaggtcagctgcagtggatgtcctgcacagacaccgtcgcaactcttgcctggttcctttttgtttttggagatggagtctcgctctgtctcccaggctggagtgcagtggcgcgatctcagctcactgcaagctctgcctcccaggttcacgctattctcctgcctcagcctcccaagtagttgggactacaggcacccgccaccacgcccggctaattttttgtatttttagtagagacagggtttcaccgtgttagccagtatggtctcgatctcctgaactcgtgatccacctgcctcggcctcccaaagtgctgggattacaggtgtgagccaccacgcccggcctattgcctggttcttgaagggattctcaggaaccacagggaatgtctgagccagctttctggatccgtgtgtacagcccttcccagaggctttgtggagccagctgtacggtgcatgagctttgtggctaagatatcagagttctgcctggcccttggccttggtctctctcagatggtcagctgctctgtttttagtggttgatcatgtagaaggccaacaggtgttgaccttggtttaggctacttttgggatttttgaggtttcctgagactcttggttttctttcatcatcccgtccagaacctctgatgtcaaactaaattctgtttggaaaagggtatgctgtagaataatgatagccacagcaatgatattaataataccttttatcggttgcagcattttcttctttgcaaagcacctctaatgactttatctctcttgccctcacagccttccttgagtgggtacaggtccataatcccatatctgtgataatgaagtctgaaaagctctgaaaactaaaaagtttgcagtaaactcatttagtggcaaaacctgatctgaactgatgtgaggctatatttatcctgcttagtttgaatattcatatgttttgctgcaaaaatattaatgtgtttgattacagagtgctgccctagactctgctggggctgttaaacacgataggtgtcagagtacctttcttttttttttttttttttttttttgagacggagtctcgctctgtcgcccaggtcggactgcggactgcagtggcgcaatctcggctcactgcaagctccgcttcccgggttcacgccattctcctgcctcagcctcccgagtagctgggactacaggcgcccgccaccgcgcccggctaattttttgtatttttagtagagacggggtttcaccttgttagccaggatggtctcgatctcctgacctcatgatccacccgcctcggcctcccaaagtgctgggattacaggcgtgagccaccgcgcccggcccagagtacctttctaaagtctgaacagttttggtcgttgaagcacctgaaggttttggataagggattatgaacgattatcattctctattgacaaatgaggaaaatgagatttggagcaagtaagtgacttcccatggtcacacagctataaatgggtagaaccaggcactcagcttgccttctaattcacagtcctgggcgctctgcaccaggccatataagaacatgagcattgctcttctgggtcaaatccatctgacctagtctttggttgccatcaccatgcctaagataccaccattggaggctacaaccatcttccttgacgtcaatcctaaaggtcaggtgtagcttctcttagtagctatttatggctgccttgtcattcacagatttgccaaaatcctttttgaatccatttccatttccaggaagtatcctttttaggggtgatgaatgacaagtttataatctcctgggctcctggaaatctggtcttttggagagaggttgttggttgtgaagataggaagatggcagaaggctttgtagtggtgaggccaggtctagacctagctctgcgtttttcagctctgtcaccattgacatcgtttttttcatcgtaagccttaacttcttcatttttaaaactaggcacttcagtgagctctttctggattgttgcgctctttaaaaaattcttttattctttgtgtacccacttatatcttcatgaagtccttttggttaattgaattttgctgttttggaatctggattggcagttcagccagttaagtagggggtcagtttgatttgattctgtgtgttctgactttttttttttttttaaatactttaacctgcttagggttactgagccatctgggatctagactgaactcttggaacttttgaagatgatttcctttattttattttcaatggaggaaagttgcccactctttcatctcagtgagaagtcccattttaatttgccatcactattggatggagccgctaattgctgggagggagaaagctatagtttagcaacatgttttcctcctgctcgttctaggaaaactattatgaatctttaaaatagtgattatcctaaactgttaaaatcaaattctattcacagctctttgatttcttgctaattcaggagagaaacttttccaatcactttaattttttttattaatttaaagcaagccctgctgaaagcccaagtatatatgacttagagtcttactaaatgaatacaggtgtgcctcagtttgtccattggagggtttctgaattttccataactaaagattttctattctgttttggctgggtgtgtggggtgaaagctcttactctctggcagttatttaagtagtaagaaatttgctacaactcttccccacccccacgttttacagataggaaatgagcactttgactgtccaggtcagacttctgattttgctacttactaactgtgacagtggttgtgttacttaacttctgtgtgcctgtttgctcatttgtgaaacagaaataatagtagtacctacttcattgggttgttataaggattcatcagaaaatatttatcctgtgtgaggaacggtggcacaaagtaagtgctccataagtgtttgctagggtatttttcttgtcattgtgtgaagtaggtcatgctagccatgcagggtgaaaaatgtgttcatgttggtccagatcctgctttctccctgagaccgttcttccgcataggcgtcaatccgtacagtgctgtaaaactgctgcctcgggcacctcatgtttggggctgagacattgcttctgcgtcttccccagaagctgatctcttgtactgtggtggccagggtactctttgtcccattgacctgaggcctggtgagtcattccagttctcgtttaaatttagccgggcagcgctccactgccatcgggtccaaatgccggggaggctcactgatgcggtgtcctgttgcctgtgcacgtggccaggcgtgcacatcactgtgcttatgagagagatgaagagcacagataccaccttactgatgggggtcctggggctgggcttgtgggtgttgggggttccagagctccttccctttcctgcctgtcagtgcaggatgcttctaaaatgtggactcagcagacattgttttgagtgcttgctacatgtcagattctgtgctaagtgcactcacagccagcatctctgtaagacctctagctgtcctgtaaggtgggtatcagtttcacattctcagatgggcggagagaagcccaagaggttagtggacttttctctagtaaagagttgtacaggccgggcgcagtggctcatgcctgtaatcccagcactttgggaggccgaggcgggcggatcacgaggtcaggagatcgagaccatcctggctaacacagtgaaaccccgtctctactaaaaatacaaaaaattagccgggcgtggtggggggcgcctgtagtcccagctactcgggaggctgaggcaggagaatggcgtgaacccgggaggcagagcttgcagtgagccgagatcatgccactcactacactccagcctgggcaaaggagtgagactgtctcaaaaaaaaaaaaaaaaaaaaagagttgtaccaggatttatgttcaggtcttctggctccatgctctctgcagctgggtgaccagggggctcatggcttcaccagctctggcctcctcagttcctctggtggcttcttgcgaggaggaaggttactgcagagggttcagctctttaggggcccaggccgcatggatccaaggactagtacgtcatctcttaccaacacagagagatcagcttctagtgatagaggccttttatgctgacttgaaaaacagaaaaagagagaaaaaagaaacccatttacaaaaataaaaatcccatgctgttaatttcatgccagcataatcagaaattcccctttctactgtttccccttaaaagccccggtgtccttattatgctggtgcagtctggaaaaactatggttgggttttgcctacgtgaggcttatctctgcagctgcaaggaggggatccggtactttattgtcagcatggaaacttccgctaaatacttagaaaaaccttaattctaaattcctagctcactttcaactgtgtcctcgggacctgattttcttcggtgtgaacagattgtgttcagcattgcagtagaaagggtccaagttaggtaagagaaaggacttcctgagacactggggtgttactgagaaagttgttagaagactgtcacagacattttgatgaaggggggacattctgggccatttgaagtggtttttagagttctttcctctttagggccattcggttcccccagaaataagaagaaaagacatatacacgcacataaaccaccaccaccaggcttgctgagaacaagtcaaatgtgccaccaaaccatcgtcttagtgggagatggggtggcactgcaggggcagaaagactgacgtctgatggacttgggtttgaatactagtgctccatggtgaatttgggcaaatgacttcacctctgtgaagcagcagtatcctcttctgtgaagtgaggttagcccctacctctcaatgtggtttttaaagtatgttaatgagatcacttgtaacctaaagcacacagagtgtgaggccacctccctacttcctgcttctctcatgaccccagcctgacaagggagccgctgagccccctgccaccctcacccggcgttgtgctctaagtggattagctcagcgttgtgatcttaatgccattaggcctgttggcacggctctccttgccatagtgagaagcagatgtggccgaccataatggcccttagcgtgatccatcgggcccacagtgctggggcaaccattattagtgttaatttgggggagctttttatggtagctgggggaaatgtggagggattgttggaaatttatttaagctgttcagcaggttaggtgctgctggggtctactatggcaaaaccctcagctcccccaacccatctctttaaggaacgtccctccccaacaccgaagcccaggcctgattacttccagagttggagagacaacttagcaggctcttgtttcttgccgatgtaccttattagtagcacctggcatcataacccactaatgggaaccagtgctctcctcctgcgtggccagtgacaagtagccctgtcagccggagctcgccgtgcgaggaagttcctattagctttatggtcaggagaacttgtcctgttcaggaaatgaatgttgccgctaaaggtccgcggccctgaccctggcggcataacctgtgcgggccggggagaccctgtgcaggatgcttgggatttcagcccctctctggttcttgtcatatgtaaagagggaatcattgtggtatgttgcagccttgaacttttgatttatgcagtgagggcgacttaaccgtttccatgcctggacggctgtgcagtgacagagccgtgttgtgagcgtatgtgcctaggtacatgtgtgtgtggggtggtcaaggggaaggagagacccccacgtgctagcaggggctgttgctgggagcgggtggatttcatgggaggattccttttcttttttctttttcttgcattcttgcagcatctaaatttcctgcgattgttggctgcaaagtggtaagaagctggagagcattgtgtctggaattgaacctgggttcgaattaatcttctgtctcttagaggctgtgtgaccgtggcaagattcctcaccactcacttcctcatctgtgagatgaagttaataacttctgattcatactggtggtagagcagtgttgttaagtaggtgatgtatagagaatacatggcccagcgtccggccagtggtgtggcctcaggttgtatacttgaaaggatgtgtatacttcagtattttttccattgtaaaattaagggttttttttctttttttcttgagacagagtcctactttgttgcccaggcttgagtgcagtggcgcgatctcagctcactgcaacttccgcctcctgggtccaagtgattctcgtgcctcagcctcccaagtacctgggaccacaggggtgcaccaccacacctggctaatttttgtatatatatatatatatatttagtagagatggggtttcgccatgttggccaggctggtcttgaactcccgacctcaggtgatctgcctgtctcagcctcctaaagtgctgggattataggtgtgagccactgcgcctggcctaagtttttaaaaattaaaaagaatggcatagtgcttttttgctctttaacagatcaagaccaaaagttttccccccatcatagcccaaagtcctaaagaaaggctacttaagttgttcgttttcttttgtttctcccatgagtaatgtttctaagtgtgatttttgcagagaacagcagtgtctgacctcattcttgaggggaacttttctgcctgcctcttcttgagaaaaaatgtttgtgagttgtctggcaaatggatgcgttacttttgctgctgttgctgccgctgccgttttaaaggcccctggtgacaaaggagtgaactgcactttcggggaaagcatgccggaatctggcccagaaaagaggggccgctgggggaagggtttggagatgacgcctcctcaggaactttaaaagaaatctgtccatctgtctctggcatttatggcatcgttgacagcagttcaaggaaaaataaaaataagttcttatctgattgcggggctgattgcaaagccgaaggactagagtggccagcgagtcgggcggctggatctggagttttggagaaagggccactggctcatttctgggcacgcacgctcacggaggcaagttctcacctcctcgtgggcttctcttcactttacgtggaaaaactgtgtacgtctcaaattaaaagcagctcttgccccgcttagagccggtgaaagctgcttcgaaggcgtttgtagagtagggattggaaatgttcaatgcaaaagttaaatcgtgacagttgtcccctaaatgatctgctaaattaaggatccgctaacatttgtgagtctacctccctgcattccccccacccccacccccgcccccttggcagaagggataaagatggtacctaaaaacaatgtgaagcggctgctaaatcgagtgactctaaaaacatttttctttccttgaagttcagtgtggaaaaccagactggacttgtcagggatgcagacctatatagggcccatgtgcctggcccctttcctcactttctagcacaatggttttcattgccacctctcccgcgcctttccccccttcataattatccactattttactttctgtgtcctgacagctacaagagtagtttttgtttttttgagctgagtagctgctaaatattccccagcagccagattcaacggctgggggggagaataggccaaaccttggcatcccctgttgcaaaagtgaaaaatatttctgtttgcagttaattttagtggcaagcagatcatgttaactggatgtaattgcttccagatatggccgagggttttgtgtgttgagatgaagggtctggtaagtgcttacttcctgtgtaaattagcctattccattcagtctttcattctggccagccctggattctgtcattctgctcccattttccccctccccagcctgcagcctggtgtgagaagccgcttgctatgttcctctaagtgtaattcttttgtcacttggagccactctcctcttggttcttgatgtgagtttgcccttaaataatgagaagggtttgaaaagatgccacctggaccccaggccacctcccgcctctttcccagcaaaggcagatctgaagagcatctcctggtcatgggggttgcatcttggaacccagaactccttgttttctatgcatttttttttcctactgccctctgacccccgactctcacctgggagaacaccttctctttctctcaattagtccgactcctcctcagcctgaactaagcacgttccagtgggtccgaaatctcagaaaaaatgaaacggctgttgcgcagaggagaaggttgtggccacagaaaggagttgcctcatcagacgtgaagccgccaccttgccttgcaaagcaggctgcacctcctgacacacctgcccctccctgcaagaaagggaggggaaatcccacccaagagaaccttctccaggttcctgtgggtttccagggttgcaactgaagaaaagtgttaagattcatgttctcctaaattctgcttttgtcctgtggccagtcccacattcttagtgctatttgcataagaggttgctgtttatcttcctatatcagccccactgataacccctgtggtctgtttaacaacctatgaggagtagattacttgataaatgccagtttttccaatatgcaaagataaactgttggggtcagggtgaggggtggtgtgttatgaaggaggggacaggtggggagccaggaccctcttttagtgggctggagaagtgtgaaagagcctgatgaaagaaaacaggtagcttgtcacatacaacagctgcatttatcatacggttgatcagcttcctgccctcacctacttttctcctccttcatgtggacatgcagagtctctgagaacatttcatcaagtgggttgcctatgcccacattaatacaagatgggaaagggtggaggttatctttgctttttaagttcccatctttttctcccttggtcctctcccacccctacaagttgttggctggtaagcaattgatgctcagaaaaatgatgttcatctgaaatcttaaatgagtggactttttctaccttccctgactttgcaggtgcttcttgaagagccaaggagaaaagaaaacttctgacctcatcacctagtcaataagctgtctgagaaacaaacaaaagagtttagactggctgctaaagctaggaacccagctgatagctttgttttgatgtccttgtaatgtttgcggatcgcagagggtgctatttagagcagggggcatctactgggacagactcactgggaagttgaaacagctagctcaaagtccaagagatgctaaagatagtgaaatacagcccaggaattgagggggagggggttcctcactcaagaaggagactttctaggagggggcgggcgtggtattttctagggacagtatggaatgaagggaagaaggttggctttagaaggaggcaccctgtgggaggctgagacaggtgggtcacctgaggtcaggagtttgagaccagcctggccaacatggtgaaacccagtctctactaaaaatacaaaaattagctgggtggcaggtgcctgtaatcccagctagtcgggggaggctgaggcaggaaaatcgcttgggattacaggtgcctgtaatcccagctagtcgggagaggctgaggcaggaaaattgcttgaaggaggcggaggttgcagtgagcccagatcctgccgttgcactccagcccaagactttgtctcattaaaaaaaaaaaaagaagaagaagaagaaggaggcaccctggatgaagactcaggctccagaatttactatctgtatgtcttgggcaagtggcttagcttctctgagcccctgtttacttttcttttgaaaatgaccaccttgtccatggtaatgaggataaaaaacgtgtaaagtgcatagcagagtgcaggtgtactgggtagacatgtatgattgcgctgtagccctgttatggcccggggagaaactatgaaaggaaccagtgaaatcttttgttttgggcactgctaaattgatgatagtactaaccctgtgctagcagccagccggtgaaataataggtgaataatgttagtacattgtgaatataaaagtttccatttgcaaagtgctactgctgttctaaagaagccacatttctaataaatgattgcttaatcctgtgatgctgccacagccccacagagtttgggaatgtttgggaattctttctgaagtgtgtgccgcattcttttgctttgccttttgggagggtagatgtgactattggaaatggtcaaaataatgcagtagcaaatctgttgactatagtgagtgataagcactgtcggctgctgtgtctgactcggaaggcagattctggaaggggtgtgtggggaaggcttgttggctcagcactggggtgagtgttggcctcacttcttaggtgggaagtggacaaggccaaggggcttttgatttccagctactatggctggactcccagtgaggaaggagtcgctgccatggattgcctgggactgggaagactccttttaactgctgtaatgtttctgcatttgtggtttggcctcctgtgagtttgggctccggggcggcacttctgttgttaaaagaacagaaaagaaaacaaaacaaaacaaaaaaccaggactgtcactgttagatgttggttgaggctagaaagaatggattgagttttgaccccctacaccccggggagtagggaggcctgggaggcacagtggcctgagtttgaattctgactctgcctctttggaaggctctggaaggttaaaggagcttgtgtgttcaaatcttagcctggtacctggcatatactcagcatgtattttttcccctttcctgacaatgttccttgccccgaacacttgaatagtggagagaggaatgtttgcttttcctctccattgaaccaacactcgcccatccactgagcccaagattcaccttaggattgtctgttggactcggctcttttgtgacctaacagtgcaggggccttgtgctgagctgcacatgctcgctctcgctggtgctccctctctctctctctctctgtctgcattatttatagtaaaccatattagaacagagtgttaaagaggaaggatgagtcattcccattgaaaccattgatgacataaataaaagcaaaatgcttactatgtgttttgtgcagtatttaaggccaggttgtgctaatttgaatgctcccaaactggatctgtgaaagcatacatatgtgggaaaaaattcaggtttaactagagggaagttatttattgaaaatccatttcagtatctgctttctcccttctatttacttcagatccatattcatatcatgcttgttgttctggctaacgagagggactggcttattcactagctaaggtttgtttattttcggaaggttgaggaatagcacagagaggttgtctaagtgtccctgtctccattcctcctcttgccacctgttgaggaaggcactctccacctgctttgcaggcgtgggctctcaatgtgtccaagaatcacagtcagagctgaagggcccttggaatcatttattgcagcatgctcatttgggaggagtaagtggaggtccagagaggttctgtgattttccctaggtcacacagcaagctagaggcaaaaccaggaccctcactcccagcccactttaattcttccttcacaagcctgcctgtgactgcccaggtctgttctctgcttctaccaaggggtaggcaagactagaatctgacttgagagcagtttcagatctttgtctgtgagggatgctggggggtttctggcatggtgacttgcctcctgggacactcattaacctctctgctgctgagcctgagcagactaatgtacatcaactccttaggatttacagacaatgccctatgttgggggttttgagacccaaagattgctaagacatgggacttttccttgaagagcttatactttgagttaaaatatgtatgttgatatctatgacagagaataggaaatggaaagactatgatatatatattcagagttgaaatgacttctgtctggagtgattcattttaaattttaaaaccttgttgagcacttactgtctgctgggcacctgggtaggccctgggaatactgtgatgagcaagatagacaagacgtctaccctcctggggctttcctaatggggaagaaagatccttacttagctagcagtcctgtccgtaactgtgtaagggtgattttgatacatgttgggagcctggatgaagtagcacatgagtaggatattaaaggataagtaggttttgaagacggggacagaaagaaggaaaattgtggtcagggccaggggagaaaacaaggagtaactttctttggcaggaatgagggtgattcatgctggaatggtaggctggggtcagactgtggtgctataaatgcggggagagagattagagaaggcagcatgaagaatggagagaaaatgagtttgaagttgagcagacccgggttcagattttcatgctgccacttgcaaactgtgtgatgttggccatcaaggactgtgaactggctgggtgcagtggctcacacctgtcatcccagtgctttgggaggccaaggcaggaggattgcgtgaggccagaagtttgagactggcttgggcaatatagcgagacgatctttccaaaaaaaaaaaaaaaaaattaaaaatgcagctgtgcatgcccataatcccagcttctcgggtggctgaagagggaggatggcttgaacttataagttcaaggctgtggtgagctatgatcacgccactgcactccagcctgggcaacaaagtgagaccctatctctatttcaacacaacaacaacaacaacagcaacacacaccatgaactgtagcttcttcattcctacagtgcagttattgtgtgggatagcctgaggatttggggtagtgtacttaacacactctgcacagtgcctgtaacagtgtagttgctcaataaatataactgctgtttgttttaactgctgtttctttttggactttatcccgggagagttggagccttggaaggcatttgaaaaggagagtgacgtgactggagtgctccatactgatgtgacatccactaggcatgtgtctgactgccccctgctccttccctgccttcacgagcctgtctgaaaaggagtttagtgcgtgatcatcagctcctaaggagacctctcccctgtatcttgtacctggcactctaccaagatttgatgaaaggacatgaaatggacccttgccacctctcggtgggcggggaagctgggagaggggcctggggagagggggtcttcagctgtcaggatcaaaggaagtgacactctgaagctggtctgccggactgttacccgtctctctaactctcttttaatagaaacccagtctcccctcttgcctccctgatagtgaacagcgacgctatctcccgcgggccagtctcggctgtggtcgtagcactacgcaatgtctgcaaaccgacagtggcatggggagataagggccccaacgttgtgtaacgaggggcatgggctgtttgcccgagtggctcctggcccctgggtaactgctaacctcaacggaggagcgggccggccttggaaacgccgttccagggcccctcgctggttccacggatgcctttttgtggttggataaaggaagctcatgtaggccgcccacagcgcagcatggccttgggctacgggtgtttggttgttttgtttttctcttttctttgtcttttttaaaaaaagaagttgaaagggggatagtcttgcttggcacctaccacctttaacccaaaaccaaataaaacaaacagttcctaaatataaattaaacttcaacctgcagtatagacatcctccttccctgcccgaaacccactggccactggaggctagctttaagaaattggttttggagactctggcttgaaaaggagccatgcccacttgtctcacgtcccagtcgctggctccagggggccgtggtagaacatatattgtacttcagctgcctttcccctccaagcttcctcagccacccacagccctttcagatgagctgagccctagcactgtgccctctcccctctgccctcttagggtgatagaatccactaccctgacatctggggttgccctgttctgctgtggtgggagatgggctggaagggacttcggaggctctcccgtgttctgtaccacccagcttccccttggatccctccacccccgcagccaggagagggaagtaactgttctttgagcaggacatttcattttcaaagtattcttgatgccgcccccccgccccaccgccaagaattctgctctgtgggtgatacttataaggtaactatatggcttccttatttaggcagcagtttctcttctatgattttagttcctctcatgattcttataaccctctctcagatacttccaggatgataaatcttctatcactgtttcatctgatcacatcagggtgattatatttcgtgacataaccaggtggctttaatccgttggtggaagaaccaggctctcacctccattgtttaagatgttatgtttctactaatctgtccactgagtgtctccatcctattgtttccattgcatgctctcaggttatttcctttgttcttggctgtctgattgctcccagaggctgcagttattttattttatttatttcattttttggtgggagtaggggattgatctctctcttgcctttagcttgaatgggtggtcatttccaggcttacacattgctccatgcccactgtaggggtctggcttagagatggtcgggggagagaaggtggtgatttaaaagatttggaggcggtggcttacattgattttagcttatctaaccctttagctagaggctgctcttccctcagagtgtccaactagctgtaacttaaagcaacagagaaatgtatatcatcccttttcttgcattaattagggctgagaaattcattatttagagggataagagctccggaggaggagggttttttgaactaatgtagagatctgtggccagctgtgtgattctcaggtagcaggtgagcgggtgggggttgatgagaggggtgagaaggagcaggtgccagggtcaggcaggggagggagcccccactccgtgcatcatcccagagccctgttcctccaagcccagattagacacccttctccacgtggggcctcaagttagaaatcctgggaggaggccttattgctcaggatcatctgggaatgttgctttctgggtttaaaatacagtcaatgtttagatgagctgctgttcaggcacatggtctggttagcaaagggttaaatcctgcatcccgtttttagtcatcaagctagctcagatctgcccaccttggagccctgtgctttcctgccttagtgggcagagtctaggggacctgtggcatgttcaatgattgaggactcttgtccagattccaaaaacctactgtgatgatgctgttctgaagctgtggtaggcggtgattgagtggagtgtgtagtgaccctcaggaattcttcagaagttaggattttgacgatacctctgataagttgggtttttaatttgctggtttatcttagagtggaggctgtggcccacagcaagtagtacattttccatctcagcccagtgcatggacaaacgtacctcaaaccaaaggttcaatgaagctctatttatctttactatatgctctggtatcttctcttccattctatcttatttcatttaagaacgttaatgaagacccactaatggattgccacccatggttcgaggaggtcccccaaacagtgaggccttagccataggtattcaattcaaaaagcatttactgagcatcactgtgtactaggtggttgctaaatgctatgggggtaatgcagagaaattaataaatccctgtaagagttcactgtaaaacagaaatgacagccatatgtgtatgactttgtgtgtgtgtgtatatatatatatcagactgtatgattaaatattatataagtgaggtatgggggagcagaggagaggaattgaattttgaattttgattgaagattcaggagggcttcatggaggaggtagcatttggccaggttttagagaatggctaggctttggacaagtggagacaggaactgccatttggaggtaggagatgagctaatgtgtggcagtgtatgggtgggggcaggtgcctgtatacaaggtagtgtgctggaatggggcgatgggcatggggtaggatgggagatcaagcagggaaagtggattggggccaggtcctagaatgatttgaataccaagctagctttctggacatttgtaaggcgcacttgataggggttggatcattgcgatattattggaagacaaaactggggagggtgtgagaccatgtggctgctcagaatgcagagcccctctgatgtcctcagccttctacgtatttagtgatgggggtggtggtggtaaagagccttgcagacagcctggcttgggtgcttgcttgaagttcttacgcccactaactcctgccctgctctgtggagcctgctgaatggggcattaggctagtcacacacctgtcctttttcacattcatgctgtaccctttgcaaacattacgcagcagtgcaaactcagccctgggcctcagaggagccaggcgtggccaggagagtgggatttggaacggaagtgcttttgtttttggcattcactactcccccacccccactggcacttggattgtccttctttttctccttggtgtctctcatcctgtccagccttcaagacctcctcaagtcaggcttctctgggaagcgctgtctgtctgtcttggtgcttgctggcttcctcttctgtctcctgtgccatctccagtttgcaccatttgagtataagctctgctgcctcatttgagtttaagttttatccccccagccacaacctaagttccatgaggatagtgattgtggtttatcttctctccctcagctgtctgctgacaccatgctgaatacatagtaggtactcagtaaataatagctaattgagcatttactatggacaaagcactttacttgcattaacacatcccatcctcacaaccacctgtgaggtgaatcctattaaaaggaatacttgggtgctttcagagttattctctccagctttggacttcttgtttcatttgccctgagagctcctcaactctgttgatgctgttctttcaaaggttgcttgtgacctcttagttctcaagagcactgtattaggttggtgcaaaagtaattgctattttagacattactttcaatggcaaaaactgcaattacttttgcgccaactaatactttcccagactccagtattggctccattgacccctcctgttcctgccaacttctccccctcctcctctggtatttcctggaactccctccctagggtcagtgccatgtggtgcctggaactccctgggatctgtgtttgaatcctgacattgccactttctaagtggcaaacactttggccacctccccctcttcctgagtctgtttcatcatctgcaaaatgctggtagtttctcttctcacaggaaagatggtggttgttcatcgatgtctgttgaaaccgtgaccctctctgctgaatgtagaagaagatgaccttaccagttctcctgtctctccagtgtctttcttgacaatcttgtggtttccacaagcaaccctctgtgggtgatttccagatctctacctctagttgtttttcgttttttgtcttttcttgtgtttcacacattcttttccagtagcctcacgggcacaccagtcctgcaaggatctagaatgtgatgtgtttgagctagttcaacaccttcctctcgaatcgtctcctgtgtcctcatgttttgtggtctctgccctcttcccaggcacccaactgcagactttggcatcatctgtggctcctgtcttccctttgccttccatatccaccatttgcctctccagcctacttaaccagatggctgtcctgatttcctcaccagccttcctgcagtgcacccctgcaaggctcatcaccccacttccctgagcagagtagggctctgatggggttgctctcctgctctgaaccctgcagtggctcactatggcctattctagagaagaaacgagagaattcttagcgtggcattcaaagccatccgggatcctagattccagctacattttcactcttcatccctttctctgcatatttcttagaatgtacacccctgaaggcagggaccatctttttcacatctgtgttacaaccttttagtccactctctagcatatggcaactcagcagatgctgctgttgagtaaactcttatgcttcccttcccatgccatatccttctctggtcatcgcaacagggccaaatctctcatgcttcagtgtaaatgccctctccttgcagcatcctttcctggggcattcttcctccttgcatccagttggaaataatatgtccctccattggagctcccacaccagaagaggtatagataaagccagatacttctttttttttttttttttttgatacagagtctcactctgttgcccaggctggagtgtagtggcatgaacttggctcactgcagcctctgcctcttgggttcaagtgattcttgtgtctcagcctcccgagtagctgagattacagacatgcgctaccatgcctggctaatttttgtatttttagtagagatgcggtttcaccatgctggccaggctggtccccaactcctcgcctcaagtgatcttcctgccttagcctcccagagtgctaggattacaggtgtgagtcactgtgcccggcctggatcttttattgtttgtatttctgttcatttcttccctaagaaaccccacgtttttgtgggcaggacctggaatcctattcagttatacagccccgcttcgtccactgctccccttcagagtctagtgccctggacatcataggtattcagtacctcttgctggcttaggaacaggaggatgcctgatggccagggtgttcctctgaagcaggggtggctgagctttttgaatatctgcattgtgctaagggttaactacccaggcagtactggtggggaagggccccagaagcaggcccagactcaggtattgttaaagcagagtcatctttgctctgaagttttttcttttatcttttcttttcttttttaattgggggaaaccttgtcctaattggcatctttattgtggcaggaataggccaggcagggctgggggagtgtgaagtctgtgaagggaggtggcctgggggcccccccacacaatgcctgattgtgcaggcataggtatgaacacattgcagcctgtgtgcacccacagggtgaccacgagcaaggcctggggacgaggactacgaggcctgcagctgggtcctcttttctccctcctcacccccacccagtacccacgtgattgggccacatcccagtaacaagcagtccttgtggaagagccttcatgaagacctttgctgggagtggcgggcagggatctgcggggagcgttgctggttcaagctggggctttcctatggatgatgtcctgtgaagggtagatcctggagggacagacaggtgtctgatctttggcaggcagggatgtctcatttgtacattataggtattcagtacctcttgctggcttaggcttcataatgtctcatttgtacatcatagccttcagtacctcttgctgatttggttaacccagttgttataccacgatattgatttttcatgccattttctttaggaagattggaagatcattgaggatagggactgtgaccttttctttttttctaccccagtacccaacctggcaggtagcacagcgcaatgatccacgatgtttaataggttgaattgtagagggggcctctgattccaaagatgggggcagaatatcagtcctctccagactgcctgggaatcctcctctctccagcctgggcctggccagtgggagacagaggctgctgaagtagctggcaaggaggcaaagaagatgatgacctagctacggtcctcatgtgcccactggggaatcatctttttgcatctgagttagtcaatgtgctgtgcattctctgcagaatttgtgaacctggtataggtatgaggtgagagaggccaggaggtctggctgctccccctctagacttcgcaggtaaaacccaaggtgtgtgccacgtaaaggttcagaggttttataggcatccagatagcacatgtgggtctctgcccctgcttgcagcctccctggggcagccagccaggctcagggcaggaagctgctgattctgggtcacttggctgctcttgcttgctgctgctgtgattgttcctacagttaagatcttagctccataagggacatacggaggtcatctaggtcatctcatggctctcaggcaagaaaagtagcattattgctctcatgcccactttatggataagtgaccgaggcctgcagaggcagagtggctattccagccattaaatgtggctccctgctattctgttccctgccaggatattctgtggatggttaggggaggggtcttacctcagctaacgaggtgcattttctgtggggtgaggccattcttgtcacttaggtgtctgaggcctgatggtgttggggaatgtcctggttctattcccagggctgtaacgtgggggaaggatggaggaagacagaatggcctctggaacttttggatctttctgagttgaggccttgtctggccaactccgggaggctgctggcatggcaagcagggtagggatgcctggcctagccaggggagctccctctctcccctctgctgcccctctttccacccccatcataaacacgtgtggactttctggtggtgagaagatggttttggagggctgggctgaggtctaggcaggcaagagcttccaaatgtgtggctttgattctcagccttttcatccctcaatcctgggagactcattttaaaacttaaaaaaggacttcattctattggatgctatgtgggcaggccctgggctgttgtagagaggcctgaaacccacttcagtttcctggacaggctgggagtgtgtacccatgggttccctgctgccctattcctggaagacactaatatccctcccaaactcttggttggtttctgctttttttctgtagcattttgtctttgtgggaaattttaagaaacatatgtatggctttttggtttccacttatttattttcccctctgagtttcagatttcatccttctccaccccttccccctgccctaaggtggggctagtgcaaatcgcagtgtgtgtgtagtgggatggttaaagagccgtacatcctcacacctggtgacgcagactaaggcaattaaccttctttagtaaagaccctttcagctgggtgcggtgggaggcacttcgggaggccgaggtggaaggattgcttgagccctggagttggagaccagcttgggcagcatggtgaaaccacctctctaaaaaaatataaaaattaacgggacgttgtggcatgcacctatagtcccagctacttgggaggctggggcgcgagaagtgcttgaacctgagagatggagactgcggtgaggcgagattgcaccactgcacttcagctaggtgacagagtgggaccctgtctcaaaacaaaacaaaacaacaacaaaaaaagcatgttttcctgtctttcccttcctctcctccaccccctggcatgaactctcaactcttagcctgtggatgtccgtttctataaatgctggtgctcggtggtcaccgtagacgtccgagcagcccctggggctttggcttgtgttttctctgtacttgtgagggtggttgccacttctggccttctttgtgctttctttttctttcctttccccaatcttttgttcctccctccctccctccctcccttcctcccttccttccttctgctttcctgtttaaagtatatggctgcacctagcatgacacagttcctatttattcctcagacttgctgggacagtctcctctgtatgcggcgactgagggtgggttccagtgccccagcccactccccttccccttgtttttgtccacttggctggacaaagagaacaaaaccaaatggcctcccctccccctctcctaaaccggtcaagcagtggtattctgggatgattttccctgcaaccatttaaacaagtgctttgatgcttacgagtcattggaatgaccaggcctgtgcgccccttctcactgacacccttagaccaggctgggcctcacccttttgtcttgctgcccctcggtgcccagtgggcgtgggcagtaggactgagcagaggggccgaggctgtgctggccggcagctctgttacagtagagtggaaggaggtcccggccagaggggcaggtcaaacaggcctcttttatttacagtgctctctttcacggcctcactgaaacaggagacccgagaggctccggtgaaagggcactgtgtttgtgcattcaggccttccagggctggctacaaaggtgggggcacccggagcactgaaggggctttttgtcattggcagtttggcttaggggagaagcgagggagagccagtgtgggagccgcctctaggattgtgagcaagtgcctgtttagacagctccacgctgctccttaaaacctattttgtggtctggggttggggcgggggcacactgcctcgatcctcttgttgtgtggagcaaagtgattcctctcttcttgtgttctccagatggttccgttgtcctcacatccattgtggttgaggatacagtgcagagaagaccccgctgtcctctgctccccctccttttctctccaaagagaagtttcagggacagcaatagacttctgtggggcctttgttccttgtagctttcatttttcaattcttcttctccctgtattatcttgctaggccttagtttgtgcatctctaaaatgggctgggaggtgctagcccatacctaatatatagggccgtcgtaaggcttaggtcccataactcatggggttggcttgcacagggctctctcctttcagactggtcaggccatggtccttttatgagtctgaagagccaaaatgaagacctcactttctagtatccccaatcttcctcccacctttccctggctcttgagggttctttgggcatgttcccctctggtctccattattatatagggaagagaaattttccagaagaatatttgaaggattaaagtttgaggttgtagaatatgtgaaaacacacacacaccacaccacaccccaaaatcacccttttaaagaagattaaaaaaccaccagtgcctgtcctacattggtaaactctggcaagcctcataatgttgactttactgacctgcctgacttcagtggccgagtctacatggggtgttaaggccccacgtgtttttgcctgtgccctttaattgtatcttcaggaccatattttcagaaccagaaatcacagccacagtttggcagtggcacagaatggttcaatttaggcctatcccagagaggcttgggttgtctgtgaagttctgggtggtctgtattgtggagaggtgaacaccgtattgctgggggtgtggaggggggatgttgctgtttccctgctacagaaaggccaggcttccttttcagccttttgttccccgattcccctctcttcctccactacactcagccctgctgctgcttccaagggacaactccctctcttgtccttgcccatctttgagagaggcggtgaataaacaccaaggcaagaagaagcaacgggacccctagaaggagatgagtgtgtggcccaaggatggtggagcattgtcctgaaaggtagaaccaagactatagcctccgaggctctgtttaccatattcttggctcttgtgccacttctgtgtccagcagctggagcttgtagaagaaagatgggaaagacatagtacaggaaatgttcccattcagccagcactgatttatctgctgcctggtttctcaggaggcctaatctgtaagaacagtcgagaactttatttctgccctttaacctatgtccattttctagatagtttctaaaaaaggcatcacaccagctctttgagacaacatgtcatatgcaactgttggttttgggtggaatgaaactgaattgtcaacggacattttttctttctgtattcatgtgtttggaatagtgacaacgtcattggttcagactttgagcccccttctggttaggctcttcagtataagcccttaaaaatatttttgacttttcagggccaggcgcggtggctcacgcctgtaatcccagcactttgggaggccgaggcaggtggatcacgaggtcaggagatcgagaccatcctggctaacacggtgaaagcccgtctctactaaaaatacaaaaaattagccaggtgtggtggcgggcgcctgtagtcccagctactcgagaggctgaggctggagaatggcgtgaacccggaggcagagtttgcagtgagctgaggttgtgccactgcactccagcctgggagacagagcaagactccgtctcaaaaaaataaaaaataaaaaacattaaaaaattgactttttgagtaaaacaaaaaccaaacgagtccgtgtaaagtctaagatgttggttcatctcaacattgggatattggaataggccactttggaaggtttctctaattgatgaagggcatgggccaccccatggattgcaatgctgtggctgtttgggtggcatccagcttctaggggatggtggcaaacttgggtgtgcaggcagtaggaaggaggaggtagcttccagagagagccattgctggggctcaagaagtttctttctgggctcaagcatggttgctagtggtccacacagtgctttcgtgtgaattagaaaaagcacccttgttgtggatggatgtggctcttaactagggtctatcccacagtgagctggttggggctggatctcaaacctctttgcccctcaatcagaggcaggaggtccctggcccaaggggcttccatggttggagtggtcgtcagccgaaagctgttctggtgagatgttttgagctatcagttccaagtttccaaaggccaaggcctctgggatcagtttcactgatccttcaaccagcttatgtgccctgttagcccagatacccctccagagtgcttcgcactgggctgcaggtcactgtggccccacaccatagaagctgggggcctgtctgcatgttctggcatccataaagctgcctgcaaacgtgagagggggtttatggcacccttttagcatgactgtctcttgtgaccaaggccaagaaaaatagcacaaagatgtaggagtggtgaggaatgaagatgcacgtgcacgcgccctgcagtctcagtcaatgcgctctttagggtttagtttggaaaaccacagtgtcgtgtcttatgtaaccaatttcttttcttttcttttcttttctttttttttttttttttttttgtgatggagtctcgtgtcttgctctgtcacccaggctggagtgcagtggctcgatctcggctcactgcaacctccgcctcccaggttcaagcgactatcctgcctcagcctcctgagtagctgggactacaggcgcccgccaccacgcccagctaattttttgtatatttagtagagacggggtttcaccgtgttagccaggatggtcacaatctcctgacctcgtggtccgcccgccttggcctcccacagtgctgggattacaggcgtgagccaccacgcccggccaccaatttcttatacataggttatggagcagggagaaagagacatgcaaacaaggcagaattgggacctttgcaagaagaccttcttcactcgcccactttctcatacttttagtcaccaaggcagggtctttttaaacaacttcgaggctcaggcctagggggttaggagagtaaaccctaaatccctttcaccctagcatgcttgggtgccgtgttgacaaggtctctgaagtgcccatgggaagcagaccaggctctgagaataatttccatggaattaattattgttcttactccaatagatttgaaatctatttaacttttcagggtcccctagctttttaaatgtttcaagtgtattctctctgataggttgccttttctctccctgtaggctataattagtgtcctttacacaaaattggcttagaattggatttagagaagataagaatcaaattaccagtatttatcttgtaaattccaaaagatctacttaagacactgtattaaaaaaggagtataaaagaaaagtttattctatgaaaaagtaaattcctcatggtctgagcaaccaggggtattttaatatcaaatctccagacttcccttggaggcacctaaaattgccttttcccttgtcgctcgtttttatctccagttgagcttctgaaatatgttgccaggctttggatattggagagctggtgtggtttcagctttcattaaaattcggaggttttgacttatctattatttctgatttgtggtaagacataagcctctaaaatatgctatcttaaagagatacacacaaattttatcttagcatgttaagtttttaagccgttgagagatggcagaatagacctctgtggtctcctgtgtgcttcttcgtcctaaaatgtcagcatgctggttttcatgtgctgcctcgtacagtaagtccccagcagatttaaataaggttgtgtcaaaacatatgcctatgttttttttaacatcgttgtctcataagtgtgcagtaatggcatattgagactgttcatagactggtcagctgcatttcctgcagccgaggaaccctttattaaggtgcatttctggggttgaactaaaactgctcacccccatcaaatgaggaaacttgaggggtttgcagcccagcattttacgggcacttttgcgactgtgtacccttgcgtggcttcccgcttcagcgacattgttgacttcagttttctaatctaattctttttttcttttttggttttgatgagagtgttggataccaaagcacaaacgatggattccttttgaaagaacaaaaacatattttgtgagcagttttacttctgggagtgttatgtgtatacacacacacacacacaccctaaataattgaaagcaggaacttgaacagatatttgcacacccatgttcatagcagcattagccaaaatagccaaaaggtggaaataattcaaatgttcattgacccatggataaattgacaaaatgtggtatatacatatagtggaatattattcagccttaacaaggaaggaaattctgacacatggtacaacacagattaactttgagggcattatactaggtgaaataagctagatagcaaaggacagatagtgtatggtgccatctatatgaggcatctgtgcttatataaagcaaatttgtagaaacacgaactagaatagatgttgccaggagctggggagagaggggaatggggagttaaggttgagtgggtacagagtttcagttgggggagatgaaaaagttctgtggctggatggtagtaatggttacacaacatcaggagtgtactaaatgacactgatctgtacacttagaatctttaaaatggtaaattttagttacatagttttactacaataaaaatgtattttatgttaattgcaatacttggcatttgagaaaaaattcttagaaaatactgagaatatcatactgataaaaaccctctgctaaattttttttaaaaaaaacacacatcgcctgtactcctgagtatcagcgatcagtctagcgttgccctttaactatcattattgttattgttaaagtgatttttattaagtgctatctctcaagtggtatgattacttgttgaggtcttgtgttggtatttgtcatgtgattctagaaaaatctccccctttttggctctgagacattctctagttgacctcttcccagagagaagttaaggaaaatcttccgctctgatttttttttctttctgcacttaaataattaaataatatctgtggccttacaacacagggaggtttcagtgaggaagaaaattcaactgcatttgcaaaatgtctgaaaattatgggagagatgtttctgcttttagacttggtacgtatgtggtcaggttttcagaggttttctattcaccatctgtgacgggccttgtctcctcctgcaactggtggcagatgtagccagagattttgtgagcttctcaacagcatctttttcctgctcttcttcccttcctctttgtttggtttttattcacatgaaaatttaaagacccataaggaaattcaaagtgaaaatctatgcccaaataagtcaggatctcaagatgaaaatataagttctggaaatggaagtttcctctgcccccgtggtggtatcatagccagcagcctcgttctgtgcttttgaaggtttaatggcctgcatgtgaaggtaggggcgcactatatatatagtaccaggcgtgtgggcgcactggcacggatctgaaaaagcgtaagtttggcatttctaggtttattttaaacttacaacctttaacgccagacacagagcttctttcccacttaatgtaactatacattgattgcttttaattagtgttggatcttttttggtgttttgcagcttgggatatataaaaagtctgacttaaattaaaaaaaaaaaaaagctaactcctgacattctcacgagtcttgcaaaaaccagcacgggagccttagaaattctaacctcctcgtcctctttatttttatcttgagtcaggtgggccaagaagcaagggaagagtccaatataacatacttaatggatggaggtaatttccttggactgttttggcagaaattaagcatctgtatttagataaaggtagtggtgggttggattttcatagcataagcatagttgctgaagatcaataatatcaaataatgggttcttggtgagggggaaaggaaatgggggaggggtcttttcactcaacagtttggaaatgctaatgattatttgtggttttcagcccagaattcttcatatttgcttgcaagcttctatggcactgccgaattctacagtaaatatttcggacatcctcagccctgttctcctttcccttcagtaaattacatattaaagtagcctggtaactgagcactggttgctgtgagataagggctgggaaatcaatatgtttgccatgtggctgcttgtttatgacacctgcctctagaacagttgagcaatgttctgtttgttaaagctgcatttcagaagcttgtatcctcctaaaacaaccgtgatcttactgggggagagagaggtgctacaacagatattgattttagtttttctaagtatggaattacacttctaaacagtggtcttacagcctgtgattttttccccatgaggaggagatgtagatactctgaatatatatatacacatacacacatatataaaataaatctattttataatgtttatgatgtggtcagttaaaaaaggagtgtagtttataataaggaagtgtaggtattatttagatttatctcctctcttggcacctggcttaaaaaaaaaaaaagtagtaacaagaaacatagcagctgctgggaaacatgcattttaatctaagtctccagtgtggttttagtttaaccagtggatgatactgtagtctcaaggcttagcctgctggtgagtcaatggttcttaaagctgtgtggtgtcagctcaagtgagcgaagcagtgtgtggtgtgtgtgcattggagggtgaggggtatgaggaggtagtcagccttggagggagaagggagacaggctaggtcttcttcacgtggccttccattttggaaaacagaagcgatgatacaacttctcttcttgcccaagggattcagtagaaaaaaatacatttccaaacacattgcgctacagtcattgaacttcaaagtgtaaagcatggattgtgttggtgcacttgtgggtgcccatgacacacactcttcaatgctcctgtgccttcctaagaggtgtctgtctttctcaaccccagtgtgtgtcctctgacgtctagtggattgctgcatacacagtcaaccctccttaaaaggtttaaaaagaaacatgagctcccttttagagcaccccaaagcagctgcattcttgagttggtgccctgcactgggattcccatggactgggaacatgatctcttaatgacactaatatattctgagatctgattttttgtttgtgtgttttttaacccaggttggcaggttctccttaatcagtagtggcaaaatgtctctttcctttctccacgtaatgctaaatggcttatccagtcatctctctctgctcatggtcagcccgaggtgacagttaaaattggatggaggtagcttggggtaggaagacttggtgattttggcggcactgggtcaaacccagggaaactgaagctgtgtctgcacagctggttgaaaggctgtgttgtgatccagggatttaagtaaaaatattctttccttaccaccctctatgccccctactccccagtaatatagtaggcatgggggttgacttattttgaggggactagtatgtatttaatatttcatctaatttttgtagccctggcctggctggatgacaaaagtgtttaaactaagaccgatttgagcaagtattttatcctccctctcgggagactatgggcatagaacggtgtggggatttggaggtgctggcaagtctggcccctttcctcttgcgtttactcaggcacagatggaaaaagatgaaactcaatgaggacccttttgtgagatgcggcacatttcgctttgtggaattattaaccttttataagactgggatacttacaaacttaccgcaggaccagacagtgactatcagaatcctctcttctaaagatcagcgatctacagctttcgcaaaacttaaggctgacttgggaatctagacagcccctagtatggtgagtgaccctagagtggtttttaatgaggagatactcacgggagccagcatctcgggggtccccggggggttcatggccaggagcgttgcaagctggtttgtttgtttgtttgttttgagacagggtcttactctgttgctcaggctggagtgcagtggcataatctcggctcactgcaaccttgcttgctctccctggctcaagcaattctcccacattagcctcccaagtagctgggattacaggtgtatgccaccacagcctgctaatttttaagttttttgtagagatgaggtttcactgcattgcctaggctgatcttgaactcctgggctcaaacaatcttccctccttgtcctcttaaagtgctgggattacaggtgtgagccacagcgcgaggccttgtttggtgtttttgtttgtttgtttgtttgttttatggatcattacctataaagtaatttagaatacccactcatttatgatccagccttccctgcattttctagcgttgaggtcctttggggccatagaagtatgtttttccaagactgattgcttcgtgtatttaaccaggttttttgtgaagggtttgatataaactgagtgactgaagagaggaacatggtgtgatttggtagaaagatctgtaattttggagtcaagactggcctagatggacagcttggccacttttaaaattttgtgtccttagccccataaacattttgagattcagttttctctcctgtgaattggggacgatattgcctaacttgtaaggttcttgcaaagatcaaatgaaaaaatacacatagatctcctggctattattggagtgcccagtaaatgctagttgccttatcctccattttctttttgagagctgaagacctgattttatttccttgcatttttcatgtcattgcctatagggagatacattcatatatttgttgctcatttttgtatgtgttacagtggtgataaagaaactgatggtatcccagatggggaggggcaggtaaggttttatcagtggcttttaatttctttatgaaattggatgtggctctagggaatagatgtctctgggatggtcatgttttcccttgccttttggctcctgcaatgaggacctctttctgttggtgtgggtcttgtctgagcatgccagggatggcagtgaacacatcgatggtggttgggacgtcctcattcccagacctctgggacatactaattcccagacctctgaaacatgggtctcagctgctttgccctgcagacttgttctcagtagctatttacctttaggagaaaaaaaaaatccttaaccaaatgctttaggaaggctttcttatcgtggctgtaaggtgctggtgggttgttggcagccaagtttgggtttaaatctcactgggggttgaggctgctgaactgctattcctaacatgctcttgtgtttttatgcatagaccgtcttctggatccttggtgagttttttttactctggggttttcaggagaaaggtttgtcattcatcatcactcttctccttcatcacagcagtggtaacagtggttagagggaggaggtagaatcagttgttcaagttcttttttcttccaggtaagtcccccccaccccccggctgcccctgcccttccgcattttctgggaagtgaatctattgggaaatgcatgggcctgtgtttctgggatgattttagcatatgtagtaagaggggtgctttttgctgatagcccaggcgttggtcctgtaatcctgaggtgtggtttaataagagctgaacagtcatttaattatttattgggtgcctggagaattttataggcaggagagcctagagctattccagaaaaaaggccaatcctagagctttttgtgtggctttcttcttgggcttgaagtttttgatgctcgccaacattcatagtagcccccaatgccacccacacattgggaagggacaatagagccagctaaagctctttctttgtgtgtgcccatattaacccatctagtcaaatgtgggtacccttccaaaccattatgtcttgttcctctcggctgctgggaacattaaaagaaccttatttgaaggcaaacattactgtatcagtgatgctgaaactggaggtctgtcaatggcacttcattgcattgataattgtttctgctttgaaccacaacactgtgattattgaggttcgactgtaagggctgagggagccttgaggccattgaaagcattctcctgcctttaggccaggcctatgttataagtgagagacaggtgtggagtgtgcagggagggaattaagatagatggtgacctggaattcagaaggtggacccccaccaccccccagcctgagaccaaagcacagtttaactctgtcatgggtcatgtgcagagggaagggactgccccagaattagcagttggctgaacaccctgcttaaaaactttttcttttcctttttttgtgagtaccgtccgcttggactaaagaagttttggtcgttgttttcttaattttgggctacagagtctctacctacatttgtgttttgtgttttggtaaccacatgtaacagccggtggaatcttttttctctttgctttctctgaactttccaaagagtaggcccctatctctcgggggattaactcctcgtggcccctgggtcgttggtgctcccccaccctgtgtcagcatctaaacctctgcacacaggatgttttctctagcgcttatcagatgctttagaagatgcggggtggagatagaggtaacgtttaacccatcctggattcctttcatgaactcagccacagagcagagggaggcttggctggagcaaacaatgttgggccttctatttcaaacagaggtgtgggggcttgtggtggcatcagtggtgcactgaacaaccctccctgaccctagcgtgtgggtttggagcctggggaatcaaagagaaatctaacaaactattctttttcacgtgtgggctgaatgaatgtgtgggttatccacatcagtttcttctctcttctcatcctccctccttcctcgcagaccagcattttggccagggtgcccagtttgagctcatttaccaaaggtgaatagggaagggagtagaaaccaaattaggcacctgtctgacaacacaaggatcttttctacaatggtgcatttggattatgcagagttttagattttctgttttatcccagggtgaacgtgtgtagaaaactgggacctaaccatgttcttctcttcagtcttatggtcattgctactttgaaggcagaaaggataaaagtagcatagggagtggtttaccataactgcaagtaaataccaagcatgtgcgagcctgtagacattgcctgctattggggaaagacggagttagctggggaaatacatcagtcttcactcccagcacccaagatgtaaacatttcttactcttcctggatcaggctatctctgctttgccttttctttcacctacctccttctttcatggcaggaagggaaagggaagtacccccaagcagccagcagtcagcactggggcctctagggaagagtggattggtgttgttttgctgtggtttgctgtgcgttttccagaatctctcttggatgactatcagattcagtgaagggatggacctgcaggaagctgagagataggagatcctgtggcctgggaacccagaggcctgggccctgggaacaactcaccacaggactcagcctgcgaaataggaaacatcattgtagcttctgcatcatgttttccatgttccactggaaaaccatctgttaaatggacatagaccaattcttgcttttcttctttctggtaccaaagagaacggtggtgtctcttgtcatctagatgttcttgtaggggcaccagagtcattgcaaccattttgagtaaagattgagtccactggggcatcagaaggggagtgtgtcattgctgttgttaccacacaggccgtggtacttgccttttcctgacccattttgcagagcaggccagctacttaacccctcgccacccactcacctgtggaaggcacatttgcaaaacaatagaccagttggtaatttggcacttgttaggtagacatagtggtacattgaggaagttcctcctgttaactaacctagtttttcttgctgtaatccgaatatacttctctgattttttgaaaaagcctgtgagtggagcctggctcgacagcccaaaacgctgaattaattctgtctctctctctctctcttttttttttttgagacgtggagtctcgctctgtcacccaggctggaatgcgctggcacgatctcggctcactgcaacttccacctcctgggtccaagcaattctcctgcctcagcctcccaagtagctgggactacaggcattgccactacgcccagctaatttttgtatttttaatagagacggggtttcgccgtgttggccaggctggtctcaaactcctgatctcaggtgatccaccagccttggcatcccaaaatgctgggactgcaggaatgagccaccgcgcccgacccaattctcttgagtgacatgctgagtggggctgctttttggtggaggtaacaaaaaaagagttgaggtattgattttagtttcatttgagacagcgatctgtcccctccctgagttccctcgtttgtttgtaaactgcttaaatgaactttttcccctgttcctccatcactctgctgttctcttctcctcctcttatcctaacagtctcataggtaaacttagaaggaagacaaatacttacaaattgtcaccgagggtaccataaaagagacatttggacagtagttctggggagatccttgtctttgcttcatgttaatacagagggattggggtagcccagatcaccaggggaaagtggtttttcttcatttagcttttaattgctttctttcacttttatgtataaaagattgtccatttaattaactcaagaatgcaatttcaaaaacactaatgctttacacatgacggcttttaaaataaaagtagcattctaatattgcataatgcttttctatccccttcctctccccgcgttcacccccacccctccagactgtattaacctttcatagcggagggttgttaggaggaaaacgctgttctggatggtgcctctctgcctctccttcccaccaaccaagtacagcagcacgacagccgcaggcctttctgaagtgttccgtagcttctgtaagaaagagactactcatcccttcccccttggccggtttcatgcctatatttaccctcttttgggggtcactgtggctcctactcccattgctgccttttaagaagcatcattatgatggattacatgggaaaattaaaaagaaaataaaaccccaacatttagctctggtttcttttgaataatttcattagaagaaacttgtatacattggtctatgatttcacgatcttcttttttttttttttttgagacagagtcttgctctggcacccaggcttgaatgcagtggcacgatctcagctcactgcagtctccacctcctgggttcaagcgattctcctgcctcagcctcccaagtagctgggactataggcctgcaccaccatgcctggctaatttttaaaatttttttagtagagttggggattcaccatgttggccaggctgatcttaaactcctgacctcaagtgatcctcccacctcagccgcccaaagtgccggggttacaggcatgagccactgtgcctgtcccatcttctcttttctgatggaaaagaaatctagctctttttcattcctttttatcctgcttccaaaatgttgtgacttccctatggcattggtctttcttattttgtaatggaagttcccctgattccagaattttccctttataccagctctcatagcccagtccctgctagatgggctttttatttttgaaagcacagtagtttcgacgagttttattttcaacagttagacttgggaaggggcaggatgcagatggagataaatgcacatacatatagatgcccctgagaaagacagctctggaacctgctagagtgatcccagccacgaggcgccagggccctggtgatcgctctgattttctaggtgagataagggaatggaatcacagagggatcagtgacttgcgcaaggtcacgctgtcaacaagggtcatagccagaatgagatccacttcctaggtgcatgggaggtataagcctcacctgccttgaagcctgcttgtgttttgtttctgatgatatccagaaaagaactttttagaccttgtaatgtgcattataaaacacttcgcatttagatctaacttcactccctcaagtctcagattaagactgtgttcttgtgttccgtcctccccagtgatgaaatgcttggttgtctagagtgaacaaatccaacaactctgccaaggggttctctgtgcaggtcacttttcaaagggatcttttctcccttggtgtctctcctccaaagagcatgatttctgagcctaccaaagtgattactgtgctaaaatttccaccctagaagaactattgtgtagctgtgagaagcgactaaaagattattttcttttcccagggtgggtgcgcaacattgactttttctcaatgtgtgatgtggagatatatgcatcttgggaggagatgcataatatgtgtctgattctataatatgttggtaaaaatgaccttggtgatgaataattttcaaagagaaacaaagctgggctgagaagagtggagcttggattggagatgatgtgcagtctacattttttgttttctgttttatttgaggagagagattttcaaattaatttggagtgaacagaaaatacagtggaaatttgggacttttttttttttaaagcctgtgttccttatagtgggatcccattttcacctcctctcctcccacctttattatgatgattattatcattattattattagtttgtactcaggaagcattgtaaaagatgctgggagggtttgaatgctgcttgtgagaggaaaggatgaggagaccatacggctttatcattcattaattcctgggttcattcattgagctatttaaacttctgtgtgtaagacggcagccccagatggtcttttggtgcctgcattagctctgagaccccaggcccggacaaaagagggtgcacagagcagctgagtgtgcagaatgtttccagccgttagaaagctgctcccgagtctttcagctcaggagctagaacacctatcatctccagcatctagagaatcccttttcaggtctttttcctttctaaaaggctcagtgcgaatctgtgagccagcttctattactgcagcagtagtcacagtatctaatttttagagtgaaattgatggccacgggcttatttgcaggtcttcttagtaattgctctctgtcttcttgttctggaaggagttctgttaacactggtgaaaactttgagctcatctcccttcttccccctccacattccccttccctgctcaactctctaaaagacctgcagctattaagaaatttccagtctgggctgatgaggctagatgggggtggctgcctgggttgaacacctaccgtctgcccgcctctgaatgcagcgatggtacacacagccccattcagtccctgcaacaggcctctggcatcctggcattaccgatgagaaacttcagctttacagagaagttcaaagaggttagatgttcagctcatgcttttaaggtcggtagctggaaatcaaatgcaggttttcccgattgcttggcctgagctcttaatgccttcttggatttctttgtggctattgggacaggctggcctcagtgttgatgggcaggtaagggtacccagccagtcctagcttcactaagttgccgctctgcctacctcctgcgtgtgcttccctagtggggctgtcccacttttggagtggggacggggctgatctgtgtcctaatccataacaggcctaatggagctgagacctggcactgcaggagcggaggctttggggtcagtcaggtggaagaaggagaggagcatggggcatgccccatcctccagatgtctgttcttctagtggacttcactttggcctttcagtagctctccatctgaatgtggcagttgtctcaggaattttgtcctagcattatctgactttattgctcttatagaaaatgctggttccccagaaataatagctggtctgtggtgagtgaggttgggtcattgtgccttgaggtgtgacatcttctttggcttagtcaggtctttggcttgactacaaatgtctgcgccttttcctcacatctcagattcttgcagccaggctctgtccgccatgccctgttgctccttactgttggagagacctggaggttggtggagttctccaaggctggagttggggtacacaatgaggccgagatgttttgcatagttccttccattgccccgatcaggaatgtgttcccgcaggatgggttatggcctggaagtgagcctaatgtaaacatccttgcagaggccatcctcttaatcaaatagaaatggtttgagggatgagcaacttgggggtgggggagataggaaaggaagagttgggggaggggagagatttagggattgaactcagagagagctgtctgggggccatccttccagcagtcctgacagaaaactggcttcatggagttggtgcagtgcaaactggaatgattctcttagggaacttggttctctcagacagtgtggtatgttgagggaaaggaaggaaatcatggtttggctgaacagctgggcagagcagcaagggaaactgaagtatgttagaagagcaggaccggaggatagagcagacgggggccacaggaggacttctggaaggagcccacaattcaactcctttgagggccttcaacatctatttaacgttgtaacattttgaaattctattttgaggggactagactctcagagaaggggcgtgaagaatgtgggggacttaggtgcaaatgtgtgtgctggggggcggtatttagggctcttggtggagcccctcatgtcatggagaagcgaaccctttccactgtgcccccacccccttttcctagccctatgaagggctcagactttcttggagatgtggagcatttcagccagaccctacggtcaaagatcagtcacagagcagtcttctgtggcaacctgtgcacagtcccccaaggcagcaatctggggtcaccagggaagttactgttactaatctgacctgggaagttttctttttcgtaggggaatctagaaatactccagggaaagccacggccaagcctttgcccagccagtaaacttttagggcttttgcgtgaggttggtttagaagaatttgccgatgccaaggctgctatgttggtttcactgatgcagatttaaagaaggagggccagtgagacctcgggaataggaaggcagaggaaacctttctattctgatgtcttcaagtcttggtgcttgaatgtgccaaggagagtgaggatgtaaataatttagtttgccttcaggatgcaggatctaatctaaacatgattaagctgatttgattttatagattggaatttataagtgatagaaactgatgaggttaatgtgaaatatttacgtaataaaaagcttcattacctgatgctgaagggtagagggagaaaatattcttggcaacatgtttaatcttttggaaatgaagttgggttaaagttttctttgtaaaaactgaattctgtgatcttgtttttacacatgctgtgcttaaatattaacaccaattgagcaaattgccttttaactgcctttatttgctttcattaacagtataatttaaaagctcaagaatttgcatggaacctgttgtgcatgttggggggaaaactattcataaattaattaatcgtgagaacattatctttaaggaaggtcacaaaacatgagcatgatttccaaaaagcagtgacatgtttttgccgtttcttggggacgtgatgtacttttggcttagagatctgtgctgcgtgtgtgtgtgtgtgtgtgtgtgtgcacgcgcgagataacttggctggatcaagaaaaattttaatgactgggcatgttttaagttaagttgagtgaacctaattacactgtagtttccagagagctaaaggcaataataccattggtatttaagcactagtttgaaaattaaagccaacctatataattggctgtgctccttagatggtttatttctttcttccctccatttctgaaatcccccttttctttctctttcacatttaaaccaatagagagaaagagagaaactgcctagcgctgcgaaccacaagacggtccttccagtggggaacattaactgcattgtcctctcatgaaatgacgctaaataatgttaaaggtttccagtatgatttcactgaaattggttgcttccttctgtacagatgtttttgtggtttagaacctcagccaaggcaaacattatgaatgagatgcagagaccaccatgtcctatgaagggctgagagttcctttgggagttattttacttgtgattctgacacctctgttttgacaaagcttcattctttcagtctcttctttccgtctccctctcctggtgctattggtttgttgtgggtggttttcctaattaagttaatctgcaacctagtttttctgggtccacagatgccagaatgctgaatttatttatcttgaatgtttttgttggctactgttgagacacattcttcctcttccccttttaccccaagtctgttttaaacattttttttttgaggcttccagacgcacttcaataaagaaagaatttctctctggtgtccatttgtcaatttttttgtgggggatgtatattgtaaataatataatagatatgtaaaaggttgtaaataaaacccaaaggttatagaggaaaagatgtgtaaatttgactacatcaaaaatttaaaactttttgcatgattttctttcggatttttgccttttccttgcacatttgttggttctctttcgatataaatcagaaaaatgaatcttttatctgtcaaatgcatggcaaagattcttcccagtctatcatttgtcctacagttttgattatggttcctttcatcacagaacatttctattatttatttaactaaaaaatgtcacaatgatgtctgtagcgtagattttataaagcatctgatggtcatattttataatctaaattttggaaaagtatttggataatgagagatggagaaggtagagggagagcaagggagggatagagagggcacgaagatgaggaagggagggatgaggaagaggagaaagactggtgagaatgaatgatgttaaaagattgatttttcttcctgtaaaaaagttggctgtcgtcaaaacaccccttctgtctaagggaaatattgtccttttggcatgtacttgaaccataaagatttctctacttgaggagacctttcctaagagttacctgtccagaaggcagtcctactgttctctctcatagctctacccagtctttaagacctagttgaaatgtaggctccataaagccatttctattttcacacagttcattttcttttttttttttttttttttaagacagggtctcgcactatcacccaggctggagtgcagtggcctgattatatagctcactgtagcctcgaccttccaggcacaagtgatcctccctcctcagtttcccaagtagctgtgactacagggaatgcactaccatacctaggtttttaaattttttaaaattttttcttagagatgggatctcactgcattgcccaggctgatcatgaccacctgggcgctcaagccattctcccgcttaggccttctaaaatgccgggattacatgcatgagccgctgcacccagcccacacacttcatttttattctcaaggtacctgctgctttctggcttatggaagatacatctctgcatgtctaatctttcttagagtgtcatgtgatagcagagatgctgtcttctgtctcactcgtctttgaattctatactgtctttagcggtgtataacaaccatttataagtacataagtgatttaccagacaggtcaattcttatccattctttcctcctatacgttcttctgggacattcttcaaaagagatatttggggtcttgaagtccaacacttcgggtatttggcataaattaggttgaggacactggttggaattttgggaagaatgaaggggagagaaccaaggaagaaggaattccagagctggtagcgttgatttcagagtattctcaatctaaaaaccctgtaatcatgacctattcccaaaggtgagttcatggcagcttattcaacagatatttattgagtacctgacaagtgttttgctttgagtgaggcactgtagggcaagtaggagtaagtaaagatctttgcccttctgaagctgttctccagtttgggatttagaaaatttgttcaggaagagggcttaaaaaatagagacattctgtaaatgacctttctttgaaatcccttattctactttgactactgctgtctattcctcttcctaaatgaagctagtggaggctttttcaaaatcaattctatggaggttattggggcagatataagttagtcatctaatcatccagttagtcctgaactgaaacctggaattcattcttttatttttatattcatttattcaattagtcaacacaaagttgcacaatcaatattagctaaattagccaagtttaaatccatggtaaggcgaaactcccacttcttttctattagaaagctgatttcttagtggcagtaatgggtggtagggataaaaactcatcccatggctgtcttagaaccttcaggtgattcagtagaaatagtgctgtttctatctccatgatttattttcgggaaataagtagagatactggggtccagaataacttgatattctagttgacaatgatttctggagaacatgtccctgagacttcgtccatgtcggccacaatgttggggagcagtgaatgtctgttgaaagacagaataatggatgaagtccaaaggtaggaaatttacaagcgatgttactttgggatgacggggatgggagggaaacctgactggggagggaccaccgggcttcagtgtatatgagcagtttgctatcatttgttagaccttttgagcatctgaaatatttaaacagtttcttgttattctcctacttggttgatctttatctttgctgctgagttccaggcttagctcaatagagggaacagggagatgactgaaggcatagtgtttgtaaaaagagtttgtttcagttcttatcaaaaagttctttccaggaacagaacatacttttcattatatgggatggaaatcaggatggaagtaaatatgttctctagaatgttctagctctgagttgatttgcatagaggtcctacagatcattctatgctatatgttttttctttttttttttttttgaggcagggtctcgctctgtcacccaggctagagtgcagtggtacaatcttggctcactgcaacctctgcctgccaggctcaagcgatcctcctatgtcagcctcccgagtagctgggactgcaaggtgtgcactaccatgcccagctaatttttgtatattttttgtagagacagggtttcgccatgttgcccaggctggtctcgaactcctgagttcaagtgatcctcccgcctcggcctcccaaagtgctgggattacaggtgtgagccactgtgcctggcccaggtcgttccatgctgatgggctacaggggcacagaaataaagatctcagggcactcattattttctttcttcctttcttcttttgttaagagggaggtaggagagggttgtgtaaggatggaatattgctgcaaacctgtatacttctttaatttctctaccctcgcctgagacactggagccttttactaccatctttgggaaagaccttctagagaaaagaacctttgcttttataggtgagcagggacggtgtatgtcctccagcatagtttaaagtgtttggtctgttgcctctccagaggtcaaaggtgagacagactttttgttggtgttgttttcctccctccttcctcctttttttttttttttttttttaaactccctttccttgttatctgaacttccaaacatcagctttgatgtctattgttgggacttcaagaggactcttagcacatcggcaggtgttggttttagtgagcaggcgagagtcccacattcttccaaggagagagatgggtcccaccacattcctacccctagagcagaagttcccgcgctgtgcctcttctctggctgcttgctgaggacgtctcccagtggggtactgggtgtacaccagctttccttcccgtctttctgaagcctgtctgaagggatctgtcttctttcagagcagctgaagagaggttgtctaacagccacgtattaaggtttcattaatcaaagacacttccactgcccctttacagaaacacaactgctgtggctgtcctccgctgacggcccgctaatttgtctttcccagaggaggggaggggagaaggacagagaggcaggcgctgcccctaccctgcagtagggatctccatactggctcccagcgagcatgcgttcatgtgctaactttaggggactgtgcccggggcttcacattttcgtgcagagccatgggcagctggctataccccctccccaccctgtccatgaagcagggaatcaaaaccactggaagcaattactgcagatagataggtttaggttgtcttttatttgcaagaaaattttcatttcaagcttcaaggttttcactcccagcttcaaggtttgctgaaattgggggcagaaagctctagaagaaataagaatatgggtacatgtgtttaagtatgcttaatggacagcctcggcgaagtgaggggtgatggggacattaatagctggggagccactgacctgaaatggtacagtcttcctgtagttactgacggatgaaatcatgactttatgaaattttaatccttgggtatagaggcacaactgactttattactggaccccaggtgtgtgtgtctgaaatgagtgttttgaatctaactgcatatttgattactttctaaaatttaggcgttgctgaacttctcctcatgcttaggttggaatctgaccttctgtaaccctcagctcagaagatggatatttgggcatttgaaaacctctcagggcctcctaagtaggtgattgagcattgcgtcattgcatcgtcatcttctttttttaaagctaggtcctgtccactggggagcagctttgaactcactttattcaactcatcaaatatttactgaatacctactagatgtgtttggctctgttggagaagtaatggtgaggcgtaatgcgttcctagctcttaatttggggttagaactagtacacacatggctgtaatgaaagatagaataaaacatgttccctaagacaattggtaaatgcagtgaaagctccaagcggggaatgatcacatctgacttatttattcaatgagtgtttattgagtcctactgtataccagacaatggagatacagaagtccagaaacttgaccctcgtccccaagaatctaataagctggtaggggaggcagacactgagacatagcagcactttatagtagaatacaagtggtaataaaatgtagaacaaagtgtagaggaaatggaggtgaagcagcaattgactaggttttgggaggggctatagataaggctttgctgagaaggtgacttgtaagcaagatcttaaaagatgagaggaagatcactggttagaccagagggaaaggcattccaggtagaggtaacagcacacgcaaaggccgggggaaggagggagagagagctgcaggccatttggtttcaccagagcttgagatgtataaagaggttggtagagatagtagctggaggtatggttgtgagcctatcatgaagtcttgcttgtgcagcagagagagaagccgaccttttattctgtaatttgggagaaggtgttgaaaggttttaatcccgggagtgaaataataggaattatgacttggagcaccccgagcacagcattggggatggatatgtgggagtcagaggaaccacctaggagcccgtcaagtggtctaggtgagagagaacaagcagaggtagggaagtagcaaaggaggtggagagggaagggcacattgtagggggaaatgaacaggtcatgttgattgggggtgaagtttgaggaaggagttggttgagactcctgaggttttggcttggataactggtggatggtgggaatagagaaggagttctgggtggaaaaccaaagtctctcttttggacatggagtttgaggaggtcttggaaaaactatatagaggtagtctgcaatatttgcagtgggtcttgaaggaaagatattttgataagcagaagttgtcagtatactaattcatttgcattcattgagttctgatgatattttagcatgaacaagaatgagaagtatcttaatttcctggcagaaaacagtatttttggagtcccttgaataatgtaaagtgttttcatcaaagaccttcattcatgtgtgtgctgacatctggagagcagagatagatattttccttaggtctgggttcgtgagctataaactcttcccttgctcctaattaatcctttgtagttactgactgacgaaatcatgactctgtgaaattttaatccttgggtgtagaggcacaactgacttaatcacaggaccccaggtgtgtgtgtctgaaatgagtgttttgaatctaactgcatatttgattactttctaaaatccacagggtctagagaaaacagattagaggtgtttttgatttttgttgctgttgttgagacagaggctcgctctgttgcccaggctggagtgcagtggtgcgatcctggctcaccgcaacctccacctcctgggttcaagttattctcctgcctcggcctcccaagtagctgggactataggcacctgacaccacacccagcaaatttttgtatttttagtagagacagggttttaccatgttggccagactggtctcaaactcctggcctcaagtgatctgcttgcctcacctcccaaagttctgggattacaggtgtgagccaccgtgcctggcccaggctagagttttgggaaggatttgtttatttatttatctgtttatctatttatttgttgggcagtcttggaaaggatttatttaatttatttacctatctatcagtcatcatgagtaattctcaaatatctattatggaatcttagcacttggggatcacacaatttgttatctttcctgaggacacttaggcctggggagatgaagtgactggaaccagggctttctgcttcatattgcatttctactctcacccctaggagaacaggtaaaagataatttgtgttgagtgaggggttatgaagagacaaatgtttttaataaaaggagggttgcgtctctgtgatgagacagagtgttctggctttcatggttttccctgtctgaaagtaacaagctctagattacaacagtgaggaatggaggatgcacagatggctcagacagtgacttggagttcaggttgacatttcaggttgacttttgttacaaagaatttagagggggccaggtgcggtggctcacacctgtaatcccagcactttgggaggctgaggcaggcggatcacctgaggtcaggagtttgagaccagcctggtcaacatggtgaaaccatgtctctactaaaaatacaaaaaattagctggatgtggtggtgggtgccttagtcccagatacctgagaggctgaggcaggagaatcgcttgaacctgagaggcagaggttgcagtgagccgaaaccacaccactccgctccagcccgggtgagagagtgaaactctgtctcaaaaaaaaaaaaaaaaaaaaaaaaaagaatttagggggcgttgttagggggtattgtatacgagtttgtgtgtgtgtgtgcgcgcgtgtgtgtgtgtgtttgtgtctgtgtgtgtgtgcacatgtgtgtacaggttcactctctaccactgctttcccctttgctgacctggactggcctgctggatttcccaccaggagctctctaatgcagtgtcgactgctattctcaatgaggcccagcactgtcctggtgaaactggaaagagaaagtacgacaggtgctgtgttttttgtatgggggttgtaggatcagagaagtttagagttggtgggacactcaaggatggatagaaaacttctgtttgggtctctgcagtgatggagcaatgtggattttaacaaccagagtagcagctctcatctcatgagcacctgtatcgtgtcagtctctgagttaggttctttaaaagacagagttttgttaatcctcacaattttgtggtattgttaaatcagagtacagatgataaatggaagctcagagtggttaagcgctttacctggtgtcacacagctagcaagcggtggagcgaggatcttgactaatactgcagcttttcccacttccatggcacgctgcctccttctagcattcagtgaggaaagctctcaccgctgggagttgttcactctagactgagcgcctttcttagagaagggatttcttggagaaagattgcagagtcttctctaatgattacaagaaggacagagtcctggtggacacagttggagggtcttgtctggaggcagtggaatgagccaggtggcctcttggagctttttcaggagggaaatctgtaagggagaggagatgggactctaccttcgatcacttggaaggcggttggctgaggccagagagtatctttccataccttcccaggagccaccccaaactcctcaggcctttgtttctgaggttctctcagaaccactccaggcagagcccacaacacatcctgatgttatgggatgaatggggacatggggcagggcagcagcctggaagcaagtgaggttaaagaccgccttagcgagttttcccttccaccagacttcccctggctccccctggctttgttcatcttgaactcccttcacctcttctactgtttcatccctttccttcagtccaccctggatctcatcctttaaagccgaatcctctttcctgaagaggaaagaaggaaatcctgactccttagatcactatcctgtgagatgaaagttgctcttctaatttgtcccattttcttcaactcttcttcccctctgtccctgctccacactcaccactggcaaccactgagtctgagaccctcccgcacactttctctgcgtgtcttcggatgctgtatttacttaagctgaatacagggtctaaagggtggcagtgtcacattagggcccatcgagggagcagagggcctttgtcagagtctgcaggttgtggggatggtgactggcctggagtcggggtgaagcaatgggaactgtagaagaaaggggaaggagagcagggcagcgtggatgctggacctgtctcctcttcagccttttggactctgtgttccctctcctgggaagccatacagccttggccgcttcaagatggtgcctccttgggcagcacctactctggagtcggtctgcatagttaaatggttggaaaaaagactggagagccaatcagggatgctcacttgcagttcgtgtgaatcctgcctgacccacgtttagagacaccatagaattgtacagaaccttaggtatcaaactgggtttttcagatcccactttcctggtgagaatattcttctgttgatgtgctaggaaatgtttaatccaggtgagaaacaccagactggtagtgtttgcgatttctgtggtgtagatactcccaccatggctaattccaagctgctggtgtggtcactgaaggcggagttgagaaaaggtgtacacagtggtgcaagccagctccagggcaccgtggcttctgaacgcaagtgtggaagcgctaggagtcctagttgctaggctctagagtggaagttgaatccttggtggggctgccagtaaggtggggaggtcattttctcaccaaatcaaaacacaaaaccctggctgtgtcgtctttcttattctcatgcctggttcttgattgtggctagcaccatggctatttcaggatcccactcatactgctgccattggttgaatgcttacatccattatctcatttagtcatgacagtaatcccatgacatagggactggtattatctccattttgcaggtgaggaaactgaggcacagagtgggtcagtaatttgcacagggttctacagcctttgagtggtagaactggaatttgaaatcatgactgtctgatcccagatcccaaatccttgcccagtatattatactcgcagttttgtagcttttcacagacatttccaaattctgagtctactctcaatgcagggtcttctagcataacctttgttcctgttggcaacacttcattttggactgtcaagatgcatttcctgagatgtgagatgtcatgaccctgtgtttggtaagtttggctgcaaggtactggctgtcctctaagacacttcctgagtcccaagtccacagattttactgaggactgaaatggctgcattcttcatagacactgagtttgcctgttccaaaaatggtgatttctatagcaaccatttattctagcagatgtgtgcctggtatggttggcagagagggtgggaccaaaaatggaaacggccttttattcttcacttcctgaatgcacgccctgtatgtgaggcatataggaggaaaaacatggcatccttagaatctgtaatagatctatggctcaggaaagaaatacgtgttgcttcagactgctttttatctggagcttgagttgggctgtgtttggtttgtggcgtgttctttggcagatgtacctgttggtttcaattcaatggatgtttgtcatttggtctctgcagaatatgcacatttactgtgggggtaggtggctaataaacagagagaagacactggcttggctcttaaagatcacgacgtctatgtaaatgtgtattacatagggctttttttggtggaaagtaaaataaccaatttatgccagcctaagttaaacaagaggatttaatatcataataaaggaaggttttatggagcccagggacaggagcatggccccatctttgaaaggcaagtgagcggaactaagaatgaactgttagaaacttaggtggaattctctctctctttctcatgcttgtttagtctttgcacgtatttccattttcacctctctgcagaccacagagtcgaaaaatgaccaccccaggactcccaggcttacatgtgaccaggcttgattcagctttccctgtgtgtatcccaaattctagaaagagacacagtctgtctgatgcagcttggatagttatccactcttggccaatcactcaccgaaggctttgtggtgagtgttatttatctaagtctgctcaggctatcataacaagatactacagactgggtggctcaaacaacagaaatttatttctcacagttctggaggctggaaaatccaagattaaagtggtagcagatttggtgtctggggagggctctttttctagcttgttgatggcctccttctcgccgagtcctcccagggtggagaaagagacagtgagctggtgtctcttcttacaaggacactattctgtcagatcagagacccacccttaggaccgcatttaaccttaattacttccttacgggttctgtctccaaataacagtcacattcgagatcagcgcttcaacatattaattgtagaggggcacaattcagtccatagtagtcatgtaggataacatggctgctgggatccactcttgggccttgggaatagaatggatctcattggctcccccagaaggagaccagtgcagatgaaaaggctgaataccctgccaagacaatgtcctgtgccagattagaatctaaacctcattgtcgaactcaaacacattgcacttggggtgaatagtcctgctgtgcgtgtgtgtatccatatacgagatgtgtgcatatatacacatatgtacaggcatatatatacatatatgtatgtatgcacatgtctgtctgtgtgtatgtaattagagaggactttctggaaaaggaatgtttgagggtggccttgggttcctgttggctgtgaacacactcctaatgagctgccctgtgtctcagtttacacgtggtatttgaaattgagtctaaattcccatttcttgtactttctgaggagcagtcaagaaagagccagatttacagtttgccagtctcttagctctatgttccaaaggaattaagtcactcttcttgacagtggccttaaaatagggttttaataaaatgaaaagaggagcagtggagccacccacccctgtcacctgtggctaaatggatatacgggcgccaggctgctacgggagccttttgtggtgtcacctccagtgccagtgggatacgtgccgcaacagagaccagatgatgaatatatttttaaacttggaacccatgaaccacttattatttctgaattaggaatcaaaacatatgaataatttcaacagggtttcagcagatgtattctgcttttaaggtcactctgctttgcggagattggtcgggggtaatggggagtgaagtccagcctgattctctttgtgactcttaggacatctgtgtcatgtttgctcaatttagcagtcaccgtaagtgtgatgcgaggccctcattgcggggtcagggtaacttatggaagcaaacagccttctttattttttaatacatcactgtcacctgcgcttatgccaggggttattagaagaagaggggctctgggtggccatgtgttcatggctatgatgactgaaaaggccacagcatgcaacagagtcctcagatttacccccaaatgcttctcccaccctctattctctcttagcatctctccctgaacctctttcgccaaccccctaccaaacaaggtccagaattgaggtgttctggaattccagccttgctaagctctgggattaaggccagtcatttggaaaggggatgggggaagaggcaaaaacaaaacaaaaaaaaaaaccaaaaaaaaaaaaaaacaaaaacaaaacaaaaaaaaccaactgaacattaaccctttgggtccatagcactgagaagacctcaccatttcggccactggcaaatcagcatctcttggccatatccctgaaacctgagcttcatgtaccagaaggagacagttaagccaagtcaggctgatgaaaatctctccgttctaatgactgtgcagggtacacctgttccagcctctcacttgctctcattgtcagttggacgcaggtattgaatgaccactgagtgtggagtgcagcacgagggtgctgtggaggaggagagttcatgagcaagaagagaagcagtctcttgacctcaggaagcttgcactgtgtttggggaggcatggtcatgctcactctcttgctctcccagcacaaagggagtgggctaaagggtgggagggaggcagatagttactgggcctgaccctcttctcggggtcagccacagatcccagatcctttaccttcctcatctgcctgttttcctttatagttctattggagttaaaaaaaaaatgacagcagtgtcagtaacacacactcattttaacaagagaggcagtacaaagatatctataaagaattaacagtattccttatttgctctccatttcagctctcctctagggaaatgaatgtgctttatttttatgaaataatttcaagcttacagaaaagtttcaagaataatacagagagcacccatatcaccttacccatttggagtttactgatttttaatagtttgccccactggtttccttcctgatctatgtaaccgtagagcagccttttgaggtaggagacaggtggtattatctttttgtgtgttagaggtgagaaagctgtggcccatggagttgaggagtgtgcccaaggttatctaactatccgacaacaggtttcccacacaaattccacatgatgtcattcttgttttcatttttgtctttccttgtaggacttttttttttttcatcgagcctgcagaaggggcctgtcttgccttcacaaggaggagatggttgcaggaaagtaggaggtgaaaggtgtcctccaagtctcctcccccagatcagtcggacctcctggcctcctttggttttccctctagggcagaagcggtgctggctggagggggtccaggtgctgtttgttgcaggagcgccatcttgctttagacctttttcgtttcagacagctagaggaggtcttttacggtcctacttgacccccataaaggaagttcactccacaatacgcatctcttttcacatgaagaggcaacagagggaacaaaaggagcaaagcagccttctcctgaagaggtgaaaatatcactgccttttggagccagatctgggtttgcacactccaactcttggagtgatgtgtccttatttgtaaaaggagagttctggagtacattgggaagcaagtcatcagtcatatccacagcctcctgctcctgttaaatgtgtcctcctagatggaaaggttggaacaagctgtgccccataggttctgccatttttaggatctttctggcactgagacttttgcttctgtgatctctcattggaatccatttcttttgcccaggcgtggataatgcttttgtctaatgccagctctgccccatctggtcttaaaacgaggtgaatctgctgctctgtattgaaatatgtgatctagaaggagccataaaataggaaccttaataactctttctctctgtttcattatccatgcagttttcctggcagctgtccattccggcctcattcccacctctgggacatgtcaagttattgaggtggtactggctgtgggtgactatagatctgggccagcctgttcaactgggtcttctggggttggtcctgggtagagctgggtggatgtagtctaaaacagagaaggtagtgaggcccttcacatccattttaaggaagctgagtattgttgttgagagtggccctggcattgtcttcatcaagaatggggttagggatccggctgcagtgacactggtgaggtgagaggttgaagggatggtcagacattactgtctcttgagcgaggttctgaaagtctattccttggagactttcacaaactggagggagaccctgtgtgtccttggctgaaactagaggcccaggtcacatgaccttgggagagaagccactcatggcctgaggacccagtgagctccttgacctacgaggggccatcctgatttctccacttcccagtcaactctagaatggagtctctgcctgacgaaattgtggttattttgaaatcagcttgtcatgttccttgattgttttgggtgtaatagtctcttctccgcagcaggttgtaagcatcttgaaggccaggaccttgtcctttcttctttcattggagcagaggttagggaatgctggcttctggacccagccttggaccccagggttagcactccctggctcttgcagttcccccttgccccccaactccactattcccctggatcacagagcttggtgacagcagtgtagccccttcatctcagcgtgatggtgggagggggtcgtatgcattttcaaagcctttcctgtgtgatgtgccctcctggtgcagcttctctcatgagaatccccagcctagacgtctcttctcttccattgcagatcaagggttctcaaagtgacctgctgagccacgtgcattggactcccatggtgtgcgtgtgaaaattcctcagcccacacggatgggccagaatcagaattcctggagtgggagcagaactctgtattaaataagccccctcagataattccaatgtacactaaagttagagaaccactgtaatggtctgatgtccctcacactccccaccccagtacacacacacacatgcatgcatacacacatacacactctgttaaatggctgcttctgctgttgctaagaatactttgcttttcaggtgcttgtggatgggtaggaggcagtgcctgattttgagctcttgactaggaattgcgtcaatagttagaggagggaaggatcagaaaggggacctcagaatggggttatttaggggctggggagtcagaagaactcagaaaggggcctactgcattgctggtgaagcctgaatcttccatccactgttagcacatggctatgcagactctgattcccatctgatgccatatgtgcttcctccacagtccgggagaggagctttgggtcatgtgattagccttttgccctggacagcgcacctaagctcagcacatgtcttgggatggagctgcagaatcttggtgccgtctcccccttggaaggctagagtcttggcactgagaggaagtccttcctccatccccagcctcctgactccattgctagcgactcccagcaagttaagaaagattcagtgggaagggtatagggctgggagttgtctggatctaagcctttcttgctcagtttgatagactttggaaaatctctgtctctctgggaactcagtctcgtctggtccctggctttagcacagtgtgtccaccattgcagccatgggcgagaagccactagagctatgtctcttccttaggagagcctgggggggatcccaaggtgttggtggtttggaagggcagtgaccctgcatgaccaggatccatttgcccaggcacctgctctctgccagcctgaacacccgggagcacctcccggatacgacagccacccactacttctgcatggccgtggccacatgggcacagtggggtgaagtgaagatctcagactctggagtcagacagtctggggtttgaatccgagctccaacacttctagctgtaggatcttaggcaaattgcttaaacatctgacctttagtttttttcacctgcgaaatggcgggtaaaaactgcgactagctcctagggtgtgttatgggatgcagtgaggtgaagccaataaaacccttattagcacctggcacacagtaagcacttcatgagggttagctgtgcttgttgttcctgggtgtgtttggaggagacttgtaatcttgtaaagtgaagttcaggtcctcagagacaagtggtgtctggctgtgggttctggccattgaaggcctgggtggtttagaagggttttaagttagtgccttccctagaggtgggcacacgtctgtcacctgcccctgatgtgctatttatcctgccaagccctggggcactgaagcagcccagaggcggctactgcaaacaccagggagagatagagtctccaagaccccaaatagagtttgcaggacctcttgagctctggagcaagaaggaaagggacagagacaggccccagtgtcagtggcgggttgggagggagcagagcacagctccccatgtgcgttcaggtgcccagaatctgtttggccactttcatctgggtctgcgtgggtgggggcgtgtggtagcccagaacccacttggcaccaggtacaattttgtcttcagctccagtggctacttttctctcctttgcttcactttgaaaatagtcagcaaaatccttatttccataagcatttttctggctgtaaaaagctgaatcccaaacctgttattatagctgttcatgctattttaatctgctctgtttagaggtgagagggtagcagtgactctgcaattactgagtacatttgatccgtggcgcagccaccggagccggcagagaacccttggagtaggatggtgtcgtgtgtggcaaatcactttcaaatttactaaaacgatgcccctttgcagccatgcagatatcataattttcctccccaaggcttgttgaaatgcccatttgcttcctgccttacgcaggctcccagcacgcgccccttggcccacctgcctattccctttcattctttgtcttggccagattctgtctggtctctcttgccctccgcccctttttcttcttcctccctcttcatttcctgctcagaaatattttatattctactgactggcatgcttgtgaaaccattttccatttgccatggtcagaagaaaaatagttagcattttaaatctaccaactatttcacatttaaacaagctggcaagccgcaatgacgctgcgcctcctacatacagtaattgttgcatccctaggctcccttttctatctctgttcctatttcattcatttttctatttgcagccagcacagaatatgggcttctcccccctccttctctcctgcggcccgctttctatccagtgaccttggcttctctgagtgccgcaccgtaaatgaaatgtggcattgccacatgtatcttgataaaatatatcagtggatgaattgattttcatattgatttccttggacgagcaaggtgtgtgtggaaatcaagtgtctcttaatgatagtcctagagagagacaggatgcccagggaggagcaggctttgtttttctttcacttacgaaaagtttctgcttgttagcttgggagggaggcctgtttgctttgaaggcacactctctttctgggggtaaacagcaaatgtcccaagggtgtgtcctgatccctgagaagactgcatcatccaggtgaccgcctagagccttagggaatgtatccctctggactccgccagctgcattgtctttggagagagctgaaaaactctcaaggcatgttggaggcccttgtgcaccctgcagggtggagggtcttggctggagagtggccttctccctggccacttccactttcatatttcaggttagttgagacgtggcacttgtgaatctaggactgatgctgtgccccaagggcatgactgtgtataattcataagtgtcagcatcgatggctggctgtgtatgggcatgtgtgcttgcgagcacacgcatctacaaatatgtatgagctttgtatatgggttggctatgaatgtgggtaggcagcagtccctaggcttgcagtggcttttattagcgagctctggacaaccaaaaagacagcatccagtgaggtgatcaaaacttcatttcatctcctctgcagttgctttcccaattcactctcccaactgctcctaaataaaatagatgctttcagctgagagttgaatttctttatgaggctaagtaagcgtggcttaaggtgatactgtgcatgtgtgtgtatgcgcatgtaaagaaaatgaaacagttaactggaatattcaggatagagcgatgataattcattacattttctggctaactgaggcttaactggaaaatccttttagttcaagcactgctgaaatgctttgcaaaacagactaggatattttcctgcttttgtaagtagaaggtagtgaggtaattgcatcctttgatgtttcatgatcttgcagcacacgagggccggtattttggttatcatttgtgattgcacagtggcatacaggagatggagaactagcttggattcatgtttaccctttgatggtggttctcaatgggggacaatttcgtcctccagggcacatttggcagtgcctgagacatgtttgcttgtcacaacctaagaggttgtttactgatgtgtagtgggtagaggctggggctgtttctgaatttcctatcgtgaacaggacagtctccttctcctgctcccccaccccactacaaagaattatttggtccaaaatgccaatagtgctgaggctgagaaaccctttcaaaatttttgtcccaaaatttttactaaattcttgcacataaaatcttttgttttctctgtttttttctttttaagggtcaggtgctggaaacgttctgaataattgaaacttcgaattcattgacgtttattgttccacagaacaaatagggaagcctgccagtttgcagataggcaggcctgtccccagatggccctccagtgaatgcccaaattcattcagttatttagggccattaaaaaccatgagggccacactagctttaagttgagctaggcagaataaacaatccgagaggggggacatagctccccccctttttttcattgcagttcaaactaaaatgctcagagacttccggtagcactttctaatgatgcagggtttattctgcttaccgcgggtcagagacaatctgacgatgacagacttagaactgctttcagaatgtgtaaacatgttcattggtttgaatggctctaagtgagtcttcggcagaatctgtctggttttggtatgatatatgtatcttggggaaaatggggagattttgcatgctctgtatctttgactttctttgagaaaatacttgggagtcaatgagttcacataccaaaaaagccttatgcagaatctaactgggtgtgtgtgaaagggggagcggcggaagttaggaagactgaaggacctcctttatgacagtaaaaaaaaaatcttttaaacttaatttcaaatgaaactttaatgtcaaatgttctggaactgtcacacatcattttgttaacctatacctattaggtataggtataggtctagaatgctgtacaagacgggttaaatgaagtctgtgtgtgtctggtgaatgcatatgagtagttagagatacaccattcaatacttgatttatttgtgcaggttacctatcatggtaacctctggcaggggctcattatttcatataaactaaaaaggaaaaaactatgcctgcaagactgattgattttctgaatcactcacaaagggcagccatgcagcccaaacacacttcatctctcaagttttattttagccttttgccttacaatgtctgtcagtagggacaatggtagcaccagaggcctgggggtagagtcggagggatgaagttccgctgccctctagctgtgtgaccttagacaagttgcttaccctccctgagcctccatcctgccccctcgcaagcttgttttcaggataaagggatgggaaagccctgtgtaaattgccaagagctgagtaaatataaagtgctctggatattgttccattgttaagcaacggcaataccatttataaaccaggttttgagtccatctcgagcattgttcatgagaggggccggagcctcccggcaggcactcctttaagagctgttatcacggattactccatctgctgcttgctagccgaaatgctaaatggagttgtgggtgtacctggggtctttcttgttacagtatagactctgagggggtctagatgtgtctcccctcctttctctgagatagaagtgtatttatagcctggtgtaagtacaatcagaaggttcctataaaactctgttattactgcagtacaaagttagaaatgcttgaggtttcggcttcttggctcttccatgcggcaatgaatattttatgggaaaggaaatacttagtgtctgactctttttatagtgcagctactcacagtgctggtaaccttccaaatctcgccaaaatcaaaattgctgcctgtccatctctctactcccttcttcacaaaattgactggtgtcctgcctcgctgaggtgtccagactctcttggtggacgggtccatttacaaaatgtggggggtgcagttttcaatcctagtgaatgccctaaaccagaggcgttggctcctccccagccctgccccacccctggcaccttgtggtgctggtcagccccagcagggcctgctggcagagtgcccactggatcttccattgaaggtctccatctgccttttctgccatgcccctttcctgcatgcccactagccgctgagtggaggtggcccaacctctccaaagttcactctgatcttggaattcaaaaagcaacaggtgagtttgaggtccaacaggcccctgaggggcttttaaattttaaggcttgagcttcggctgaagccctggcacagagcagtcatcgggctggtaagatttccctctcaggtcctcttcctgtggtccctttagtgaccccacgcataaggcaggaaaattgggcctcagtggtcttggccctggtttactagatcagggactttaagtagaggaaatgggtctcctggcaggtcagcatccatggaaattgctcccctggtggcccaagggcattgtggcacaggtgttccactgggttggccccatggtcctcagagacctattacgactatagcaggaccgcagactaggctgatggccagattacagtgtcaaagaacacctttctcaggcagctatccctcatggatctccttagaggcccccacaggctagtgaaatgttgacatctcccatggaggtgggctcagtggcctcgtctttttaccagtacccaaaaagcccagagtggagagcttggcaggtgtgaagtgtggctcctgagatgcacgggagcacagctggttgtgtctcaacactggatcgtgacagtttttcttagcatgggcagggctgtgaaaaatgcttaacataatctgaatgtgggctccacacttaatttagtaggactctgcgagctcaccagcatcattgcatttgccttctgctctgcccctggtgtttgtcttggcgccaaagtaggtaaagggaaaaaatgatttgcaaacctctggcagctttggtttgatctcccaactctggttgcattgctgccaaacagagctgtattttcacatgacagcttcgtactgggccttttctttctttctttcttttttcttttgtactttttggtatccaaacttggtggtagcagaaggcaaggtggggaatagagagcttttggtatcacaggcttagaagctcatttgtctcttaagatgtgagggtaaggaaagggctagttattatttttgataaatgggaatggggtcagccaatggcttactggagaaactagatatagccctttatacttaggactgaccacacagttgaaattaattagcacagttgaagtaattagcacagttaaaatttagggttcctatgaccatgaagttgatgggtgggagataggtaaggctcgaagaactgaaaatcctcaaatgtgctaaaagcttcattattggtccttattcatattttaactcaccctcctcatctgtgaagtcattttttttaaacaatgaaaatggataaaagaaatggaaccagagagagaagcaagagagaaaaactttaattaagtgcctattgtatgatagacactgctgtgttcttttaaataaatacctttcagattaattccaaagctaagatttagcaattccctggttctgggattatttggccctaggatcagataagccaccagtattcactgagtcattcagactccagagttgcgccagatcccatggaagatgcaagaatgcatataggctgtagttccttctcttgggggttgagatcacacagctgtatacccatgtgtgcacacacagagacagatacagctagtggatcatgccggggggaactatacattccagtgctccagaaattcctggcatactgtgcctggggtattaggaaggtgacttgtgagtccctccgtgggacactccacctccttatggcagcttgtggctgccatgatgaaatgaaacacccactcctgaagatgtacaatttgtgagtgtggtagacaaaatagtgactccctaaagatgtcatcctagtctctgtaacccatgagtatgttagattacatggcaaaggaatgacttaaggctatttaccagctgagtttaagatagagaaattatgctgggttatccacctgggtccattgtaaccaacataacctcaacggtctttaaatgtggaagagggaggcagaagagtcagtgtcagtgtcagagtcagaggaggagtgagccatgggcccaggaatgagagcagcctctagacactgaacaaggtagggggacagtctctccttgaccctccagaagccacaaagccctgccagcaccttgattttagcctagcgagacccattttgaactccttccctacagaactataagatacatttgtgccattttaagccactcagtttatcgtaatttgttatggcaacaaaagggaactaatatagtgaggcagaagaaatctgagtggctcatccttgggcaaatgggagccagtgctgatccttttactgttctcgggtgctcttgcaacaggaagtgacttgcagaagtccttttttatctgaaatgccagggaggatggactcttattcagcctagcttctattcagctcaaaggaaagaacatctgcctttttcccacatcttctctgtacccctcacttccttcttgtgggggagattccttttcttcggtgagttccctttgcggtgtggaatctcgtggcaagggctctgagtaaaggaggagggttgcatggaatgccattgaattcattaggcttggactctagcaggaatgttgcctggggtgctgatgtccttctcaaccttcctttgctggagtccttcttgtaacttgtcttccttttgtgaacaacctgggtgtagtttttaaaataagcgaattctcctagaagtgttaaaaatgagccttcaagtactatctcggcattttgcaaaggttaaagcccccactgtttgggggctgagggtgctctatggggggccacccaaaagcaactgtggaaacagagtctggcttcagtctctccagatgttgtgcacataagggagggactcttgagctcatagatcacagatctgtccacaggctgtcagtaggaaagagcatcttattttacagatggggaaactgaggcctagagagcataagtggttcatgcaagatcttacagagagtttgtgagagtctgagagctgttccccctactattgcaacatttggaatgttctgaggttcttaccttctattatcagtttgagggctgtagatgagttgtggtagctacagagatgagctttccagtgtgcccccaccaagagatgaatgaaagtcatcatcgggcagatcactgcctactaaaaggggtgggtttttttggggggaggttttactcttcgtcacagaacttgagaatatttctactgaggatgactttgtctttggggcttccattttatttttaagattcaagtgtagttttaactgcagggcattagctcccttgtaggtcacctcgtgctgtctctggggtttatgactgagctctcattccttagtcacatgtcctatactcacacttcctatcccattttcctgcctcaccaagatcaccacaatgatcccaggttctatatagcatttcttttctggaggtctttaaaaatattctgggagatctgtctggaatgcttgagtacattcatttattcctgtatgcatagagggcccagggacctcccaggctctctgagccctctgattcttagagggttaaactattatggaaacagacattgcatctgtgtcttctcttgtttcctgcatgcagcagtgacctttggagtacattgttcaggagaccgacccttttctaccatttgaagtctgctattctcatctctctaccaaaagagaaactaaacttcattgtcgtgattaaggtcacagccaacagcagttaaagaagccgttggtcttcccactcataccgctgccctctccctagctctcaggaggaagagctctccaaaatggaagtgtcttgggaaagaaatggaagtggaaagagaaagatgaaaaggccaccaatggcacttcccgtgtctcagcctcaccagagaaggaacttggccacacactggttgggtataccaaagtgacacaatgtggatgttccagtggcaattaagtatttatatgactagacttgaggagttccaggccatgacacttccaaatccttccagcccgcttgtggagagaggcccggaggcttccagcgagacaattagagtgtgaattagattgtgtcttctggaagggagatgaagttacctgcctactctattacagtttatttcattaaggttgaccatgcccttttttttgggcagagggaataggatggattctctggagaaaacagtgtagcaaggcaatggagaaatgtccacactggagtaaggggctttctgggacctggatggagtctccttcctcccctagggaataggacagaggtgggaaaggtgctgcctgactgctctgtgcacatctgcatgttggtgatgagtgtggccagccccatgctgtgcatcggtgagaggaccgctcaggcaggtgttgctgtgctggcagcttcttaggaaggcaaggagcaaggcgtgggctgtggggcccttggggcagagcctgtcatggagtgggatgaaagggtgcacgggacctgttggcagccccagcggccaggctctgttcccaagctggagagagaggcaagtggtgagggagggcaggaggaccagtcatgggtttaatgcaaaatgacagttacgggggttgccattttagagtaaaacaggccatgtgactgaggagcaggtagcattcatattattcatatttcgagcttggtagatgtagaattttgcagtggaggccaggagaggatgtgagagctgcaggacagaggcataggtttttggaggtggttgtggtgttccccgatggcaatcaacttcacggagagaagaggttattttctacttaggttgcctggagcctacattccaaacttttagtcctcttcatctagcactaagttttgcatctcccttattcctgtcatacattattagtgtgcactgttttaaagtcttttacatacatatgtcttgcattccctacttaattgtaagctccttgaaggcattgcctgtgtattatgtttctttgaatctctctgtggtggctaatgctctgccctgcatttagtaggcaataagtttgtgttgagttttgagtcaactaccactcttttctcccttcctcttttttaatttttttttaaattattttttattttttatttgacacagagtcttgctcggttgcccaggctggagtgcagtggtgcgatctcggatcactgcaacctctgtctcccgagttcaagagattttcctgcctcagcctcctgagtagctgggattacaggcatgcaccaccatgcccagctaatttttgtatttttagtagagatggggtttcaccatgttggccaggctggtctcgaactcctgacctcaagtgatccacccgcttctgcctcccaaagcgctgggattacaggcgtgagccactgtgcctggcctactcccttcctcttacaaggctccttactcatttcctgcgtctcacctgctctctcagcccagttttctaaaaaaagaggtaagagatggatgccagtctctttctcctccagagtgattttgtgaggatttgtacaatgcaagtcttgagatgcaaatggacatctaggaacagaggaattgctggagcatggagaccacacttctgaagatggaaggagacccttctccaggctgtcgcttttgatttgcggttttcccattgccaattgctcacactgatccccagtcctgaaggggatgggggctgccgctaattccctggcatctcatgacttcctgttttcctccagttattatttttattgtacttccttcctgcttcttcactctccggcttcgccagtttgttccgtgtgatcatttcagctttatttggaaactggaagcctcattttactataatagtttcttgacgattttctaaatgaaacttgcatacttcatctgctcccccactgctcagatattaaacaaatatctctaagaggtttccttctccccccccaaagaccagcagtttgctcaaacagatggcgagagatggcgtgtgtgggtatgtgcccgcggtccacgtgtgtgtgtgtgtgtgtgtgtgtgtgtgtgtgtgtgtagtagaggattcttatggaaggtgccagtttctgcagcatcttcttgcctttttggcatccaactacggagcaagacagagcctcctggcaagtgaccaaacagagtgagtgtccggaaggcccgtcaccctgatattcacgcaaagaatctgtttctctgtgaatgggcggctgtggaggaggccgggggagcaagtggctggccagcctccaaggccagatgttctgtagtaccatatgtcaggataggaaggacggcaccgagggctcctagagcgtgtcagacctcagctcttgaactctgtaatcctcatgcccccttccgtcctcggtcaagaacgaacaatgcttccctctttgtctgcttttcaaccccacctcttttctccattagctttctggtctaaactcattattgagacccctccacaacattcaccttgcctctcctttgcctggccccaggctggctgcccctttttctggaatgatgctgttttggtgcctgtttccctctcatctgaaacaaccacctcctcttctatgtctgctgcctccttggtatcttctaagcccaggcatgagcccccctccttggggaggcctgagcttttgattcccactcaggctgggtgttgagattgtcctcaggacctgacgtgcacatgtaagtactggtttctcttatagtgtgtattgtcttccctcttcaactaaagctttaggagggtaggttggtgtcttatgctttggttgtatccttcactatgccaaataaatacctatcaatcaatcagtcaatggattctcaacttgcctaggcccagaacagaggagacctgtctcctagccatgttgagttggtagccagtgcagggtgctgaaggaaagaagtgtagctcctcggctgcccattcttgctgccatctgcattctgatgagtagaggatggcatgtttagttggttggaggtaacgaacagaagcaacagctcttttgagttccctgctgtggtaactcttactccgtggagtcactcaggcacctgtgctcgggagtagatggagataggaggtttgttccagtctctcttttcttgtaccttcctagggaatagcaatgtcctgtagatgtgtgacagtgataccatgttggcattttgttctggaaggctgacctaactactgtctttggaaacattctccttctcaatttagaatttgggcccttttctctgtctgtctccttccatggtccctgcccacgctgagcctcccgcgcccagccagctccattgtttcaagaagggctttggggctgctcgatgactgcagcactgggaccaaagtcctcagcatcagtctcaggactccgcatcatcagcccactctaccgcctccgcaggctcctcgccgctgtcttcaccacctgcccactgtggataagccaggccagcctcctgaaggcttgcccggcggggtatgctcatttctaacaccaagtcttggctcatgtgatgcctccatcacacggtgctccccgtctcatccaaggcttttccattcttaacatttccaaacatgggtagctagaacccttcggagcttccagagcccccgaaaggaccaactgaatctcaccatatcctcagaccgtctgcagtgacagcagctactgttgatctgctcctcttctgcacacccatagtgatttgttgacatattggcacatcaccacatcctcctctgtctctttctccatctctgtcttgttgtccactaggttatggactggccagggacaggggcctttctcttctttagtcttacactagctacacacttatcataaagacattatgttctcagtgttgtgctaagttgttttacatgcacagtctcatttatgtaccttcgcaggtaacagtattgttagtctgcttgacagatgagaaaactgagacttggaggatcccaaagtcttagagcctagcaagttgtagatctggaattggcagacagggcttgtgtcagcctaagttcttaaacttcccgttctactaactagtggtatcaggctctgccacttacaagcttaacgaccctgggtgagttgtttatttccttgtgcctcagaaagaaatagaaataaaaatacccgcttcatagagttgtcctgaggatcgaatgagataaggcatgaaaatgcgcagaatagtgcctggcacatagtaagtgctcacatatgtcttgtacagatttgcttctaattcttcttcatcaccaatatcatctaaacgttgttggtattacagttatcacttttcgtgtctctgacatcattttagcacctgagatgatgttatgctcttggcttgtgctcaggaaatgcttaatgaatgactgaaaaggcacttgggcttctggaggtgacttggtgacaaatgctcagtgtgatgttgtctttgtggcagatgctcattatgaggttgtctttgcctatattcaggcttggcaggttcttgtggcagcggtggttaaggattaaggcattgtgtggagtatggtgggggctgcagccgacaaccttcctgttgcctaaaaactttttctccttcccacccccttccccagtagctctatgccctgccaagtctgtgcacaagccttgaaatgacaaagtaccctttagttaattgcacaacggattgcctagagttaaaagttctgatttatatgactatagctctaactgctcaataacacaggcctgtaatctaccttcatttcaaacagaacggtgatttatagggcagcatgccgctttagctcagaaatgaggtgttcaacatatgcgctgttgacataaatttggaatttatcgctgttgtcaaaactgcctgttggacaaaggtgggtattaaggcaataaatggctcagaatagttttctgtcacatttcctaaccattgtattcagtctatttgagggaaaaatatatacttaaaagtaatcaaatgtccaaaatccatgcatcttgttttgaatggtgggaagggaggatgtagggaggatggaggagcatggggccttggggagggggagctggggggattgtggaggagaaagcttttcatgaagttatggcccgtttaaaaaagattccactctgcctcctcccccatccccatcgggaggtgggctttcctttctcatttacaaaaacggggaggaaaaatgaaagctcattaaataaaaatagtaaaggacatttttatgtgtgggcttaaaaccagcaatgtcagggaggagttagtgagtggggctgtgagggaggcagaacaggattttgtttatggggaaataaagcccctggccagcgttggtttctctgctgccttggtgagcgtgggcttgctcccacctactctcccaggttccgaggctcctgtgcacacggtgaatgtgtgctggctgatgagggtgaggagcggtgggtacccggctctaagcaatatgttctactccatccaaatcccgattgatttattacccactgtacagccaagatgcatccacccctcatccatccactaatgctgtgccctttgcaaggcttgagaatacaagatgaatgaggcaaagccctgtcttcatgtagctgcccatccagctggagagacagagaaacaagcagatgcaccctagtgagtacatctgctccaacagaaacacacttaaaagacagaggctgggggggaaagggggtcagctttgagaggggacagaggggagctactggggaaggcttctagggatggtactgaccctcttgcctagtgaaatgtccttttggaagtatcaggttcctgcagggagattacacaaaaatgtagaaaaaatacgctagtgacaggtcctccctccatcccagatgtgtgatgttgtggtcaggtgatcactgatgtgtgtcagtgtattgtaagagtggggccaacgtccttgtgcattgaggctccagcctctcttctcctccatgccatggaccgtcgctgcatcatctaagcacagggcacccaggcgggtagcacaggtggcttagcaaatgcagtcagagtcaaggttaagaatcgatctcttcattctgtttcaagattacatagcatgcagtatgttgttgggtattgtgttgcaccgtgagactgaaagtgtggatgtttccagagagccgctgcttggcctctgtgctcgttgggcctcgagtcactggtattatgcatttcctgtgtgctcgggagccttgcgtgtaaggagcaagaggagcacgcaagctgcctggtgcttttccccatgaaaatgaggcccagcagggaagaggattcgtatttgttgcttttattttatttttccttttatctccatgcccacacgcttggaccgtctcagcattgataaatgtgtgctctcacaaacatgcacacaatcccctttctctggcctgtgtgtttgccagacacacacacacacacacacacacacacacacacactcccacgcacactgggcatggacaccaattgtaaacctcgtctgtgtggctcaccctccttttgccaccaacccctgtccttttcacacaaagctccctgttgggaaaactcataattttcacaccacacagccttgactggccattgctggaattactgtctctttgaagtgctttctactggggcatttacaggccgttttaattacctgcagcttgcaaagggccttgctctgtcccagcctttgtttgtttgttctttgcaaggagtctgtgtagaaaggaatacggctgacttcttttacaaaaaagaaaagggggtagaaaaagaagtttggggagcccttaacagagcttcttgccgcagcctgctgtgggacaccatgcccactctaacaaggccaggaagagaggctctcgcccttggctgtcttctcagcaggttccagcaccgtgggtcccactcctggagcttgcctgggatatttttgttcatgcgtttatgttttaattattattaagtatattttcaagctttctaccagagacagcaagggctgtcaaatcatgtttccctcactgttgaccaaatcaaagctggcttcagttgagctgggatccctcttatattttcaactaaatctgttcaaggaaggtgcattattaaattattgagtttagacgtgggctggagggtaggggttgaaatcacatatgtgaaaggagtgcccactttgagctgtctggtgtttttctttccttttcttcatttttcacttgattctctaaaaggaactacatataaatagcattctttggggtttctgttaaatatgagtgtagcatgtcatgtctgcagatgaagatgctagtttaccaaagaagcctcagaactgtatcccctttttggggggcttttacagcagaggaaatctttattcatttattcacttagtccaaaaatgtattgagaaattggaaacctcatacattgctgatgggaatgtaaaatggtatagctgctttggaaaacagtctggcagttccttaaaaggttaaacatagagttaccatatgagctggcaattccactcctaggtatatacccaagagaagtgaaaacatatgtccacacataaaacttatacacaaatgttcatagcagcattattcgtaatagccaaaaggtcaaaacaaccaaatgtccatcagctgatgaatggataaacaaagtatggtatatccctacagaggaacaaagtactgatacaagctatgataggaatgaagcttgaaaacatgctgtgtgagagaagccagaccccaaagggtgcatattgtatgataccatttatatgaaatgttcaaaataggcaaatctgtagaggaagatagtacatatgtggttgccaaaggctgggggttgaggggaggaatggagagtgactgctaatgagtacgaggtttcttttcagggtgatgaaaatattctggaatttgatagtgatgatggttgcacagttctatgaatatgctacaaaccagtgaatggtatacttgacaaggataaattttgtggtacgtggaaaatacctcagtaaagctatttagaaaagtgtactgaatacttactctatacagcacaccctggcatactctgaggttatagtggatggtttctgccttaatgtaacttatagtctagtagagataaagaatactaataaaaagctaatatataactgaaaattgtgttaaatgttataaaggaaatcaacaaaatgcaatgatggaaaattgcgttgatggacaacctacctagaagggctgtgggtcaggagcagcctgactttactggagtccagcatacggtaggcgcttaacagatatagggtgagtagcagtggggcatgagtcggcttgccttccctgtagaaggttatgaagtccctgcgagacccacagcctgtcagtagactctgggtaccatcattcaatttactttttttcttagaggcctctctgttcttgcttctattcaattagatggagaaaatcccaggaatgctctcggtgactcctttttagctgctggttttcctgcccctttcagggaaagactctggcttaggtaggaatatgaaggcagaccctgaggtgagaagtctggcgaagtctgcctgtttataggggcaagtaagtcatgtggcctcactttctccatccacaaaatgggctctatactgtccatgtcagccacagggtggttgagatgatcctcaggaagccctttcaaagtcagacatgatctataaatgcattaccttctttatcattaaaacctcagttggggccaggcacggtggctcatacttgtaattccagcactttgggaggccgaggcgggtggatcgcttgaggtcaggagttggagacagcctggccaatgcggtgaaacccccgctctactaaaaattaaaaaaaaatcagctgggcatggtggctcatgcctgtagtctcagctactctggaggctgaggcacgagaatcgcctgaacctgggaggcagaggttgcagtgagtcgagatcacgccactgcactccagcctgggcgatagagtgagattctgtctcaaaaaaaaaaaaaaaaccaaaacctgggttgactagatgttcttttttgcatttttctagaagaaaggaagaaagaaccagtaaggaagctaatatctgtttggcttttgctttttttcttcattaaaatgacaataatgtttacaatgtgatttggtacccgtacaggtaatccgttcaatctcttatcttgtgttcataattgatgtttagagtgatagctctccagctcagaatcctcatagaaaagtaatttaattttcagtgtaccaaagcagaaagaatgaggcaatatacattaaaaaggttttcagaatggtttaattccagaggaactttcttcttaggcctttaataaacctcagttattctcaacaatctctgagtttccatggctggtccatgggatctgaaggtagcattgtgtctccctggctagagtggaaacatataaaaatgatcctggataaccaggagacaacatttccttcgcatgtatccaggcagaacaaggagataaaggaaaagtctgtagctttttgaaaactgttttcccagaaatcggttatttgtgctggttaaaagccttgtacgggagagggagaacaaaaaccctgttcatccataaccatagtttaattcccttatagggccttttaggatctggagagaatattttggatttatttttgtttcccttgggctgacatcatcaagcatgcatcatggtgccctgttttgggtttggaaaaagctcagagaagctataaatcttaaagcattttactattttttccttttccttttctaaaagcacaacttttctggtctcttaaaagaaaaagaaaaagaaaaaactacaaaagtatgtattgatctcttcccctcggatcttaactgccctggctgtaataccttgcttacatctgccaggtttttgtgcagttttgcaacatctccttaatccagtgagcataaatagaacatttcaatcatatttggctaccaggaacttcacagataagcacgctaagaccttgttgaaagagactgtatgagattgtgtgcgataagatcatcctatagcccagtgcacaaatgaaaaacttttgttcttggtgaaatttgttgatagagatatttcaaataaatgacttaggagaacttagtattttaaaacaaaggaccggttacgtagcagccagaagcccaggcctcttggttctccacagccacgaagatccctccttgagcagttgctgcagggagattagtgtgcccctttgtcatttctgacattgtgttttagcactcgcaggcagccttatctgcaagtgctgtattcggtgtggtcatggccccagggagtgccattgtccttcctcatattttcaaggctcaggacagttccctccactcttcagtcagctccagattggccttcatccaggccaaggcaggatgcataggatgcatggctggctggctggcttgcttccttccttccttccttccttccttccttccttccttccttccttccttcctccttccctccctccctccctccctctctctctctctctctctgtctgtctgtccctctctctctctctctctctctctctttctttctttctttctttctttctttctttctttctttctttctttctttcttctttcttcctttcttagatggagtctcgttctgtcacctaggctggagtgcagtggtacgatctcgacttactgcaacctctgcctcctgggttcaagcgattctcctgcctcagcctcctgagtagctgggactacaggcacctgccaccatgcctggctaattttttgtatttttagtagagacggggtttcaccatgttagccaggatggtctcgatctcctgacctcgttatctgccggtcacagcctcccaaagtgttaggattataggcgtgagccaccgcgcccgcctgcctggctttctttctaagaaccccatagagagcttctcttttggacagtaggggcaactgttttttactggtgtgtgtgtgtgtgtgtgtgtgtgtgtgtgtgtgtatccgcatatgtgtgtagacaaggtgagtttttttccacctctacatttttctcttccgattctctttcttgtttgtttgctcattcagtcaacaaaaatgagcccctgccatgttctgaggtcagtgatgaagactgagaggatgaatctggtatggacccttatgcaggagatataatccagccagcacagacccatgtcagccccacagcctttcagttttgtaaacctggttggaaagaacctaagaaatcatctagctcaacctttgcattgttgcagaggtgtcaagtgaaatctagagaaactaagtagtttggccaaggttatttaatggatatctgcagagccaggtcccctgcactcagcccgatgtatatatatgtacacatatatacatggtcaatataccactgttttaaaggtgattcttaagaaaacacagctggtttggtattttctctctctccctttaaacggttccaaaacaaccaaatggccactgtcttccctaactctcctggtctggatccccagcagagaggcacctgctgtgtgctcccaaaacctgcagcatggaaggtgttaactagcactcagttagttcttggttgtttttcttaatctgttgtttgaaatccttggcttttattggtatatttactttatggcatacataaagagctgtattaaaaaataaattgtgttgtaaaagcattcggtaatgtttattaatattgactagtcagggagcaacgaactctattgctagaaggataatttgtggtaatacccgctaagcattcacagcttgtcaaatgactgtctaatctcaacattaaaaaaaagtgggcaaaagggtaatttcccttatgccttgagaaaatgaaagtgacccattccccagccaacattagaatgattgcttctttttctcccctgggataccaggcctcctttgtggttccaggcagtcccatggctagattttagtggttaggtatccctttgtcttagggtggttggaaattgccttgttagcaatagcttctcatatgtctgttctggctgcctggatctgtgctgaggccataaaagacagagataaagacatagttcttgcccccacagagtgtatagtcttaaggaacttataaatggcttagtcttgaatcttgaacttaatattcctacaaaatacataaggagaatgacactgggtgtgactaatggcctacttagcctggaatgtggtacttttggtggcatgaagagacattccttgggaagacatgatgtcacccttagaaggaagggaacattccccagagtatccctgatgccctatgaataacatggtctggcttagggtagaggccgctagtagaacaggctctgtttagagtattccttttacacaaaaagacacatagaaagtacaggagagctagtctgggcgtggtggctcatgcctgtaatttcagcactttgggaggccaagatgggaggatcacttgagcctaggggttcaagaccagcccagacaacatagcaagacctcgtctctattaaaaacaattatttaaaaaagaaagtacaggagaatggactgaatatggaaacactctgcagtctccctggaagttgctttggggaggaaatactgatagcctcataactttgcattcatcccttcctcttaaaattagagcacagaatgccgttgactatttcacctttcctttgtcatttgaattaaaggtaaatggacgttgaaagtgtgtttttgacttaaaggtctaaggaggaagagtgagcccattgctaaagtacataagctttccctttactcaattctgtgtctacttggaaaggtgaatgaggctagggcaaggttctcttatcaccgagcttaagagtcggttgcttttgcggctgagagcattggcagagctccataaagggacctaccttatgctgtccccacatggggcccaaggctgcatgtcagcaccaactgcccaggtcctgctcgacaggaccaggaagtttgcatggtggctgggtaagtagatgatcttggagagtgttggttctcatgggggcggcagactttttggagaagagaggatcatttaggtcatggctgggatcttacagaatctcccgtctgcttcctatctattctgagtacccctctgaagcactgagaaggtcaaattgatggtcataggatcagaaaggggtggtcataggatcaaaaagcccaaagcatcggggtgacttttgcactgatgaggtcaaattgatggtcatagaatcagaaagcaaaaacccaaagcattggggtgacttttgcatgtggagtggcctcatacctacaatagggtgagttgggaaggattatgtactgcattgatgtggtctgagtgttggttcagaggatggctcagttaggctgaaaacaaggacaacatcgtcttataaatgcccttacaggatggatttcccactttatttttcctcattcaaaggcgggagagagcagtgggtagtccagctgtggagccctcccattcacttttcccaattacaggtcctagttccccatgctggtctttccagcaaaactcacaggtcagacaatttcaacccttggattattggaactgaggtttctttctctaaaccttccctgcctgttggtctgctccaacttgagcatttgcccctgggctcaggaacctgggaagacatgtgacattggcagtgctgggacatgaacccctctctctcagctaggtagtgctcctgggcttttccctttgacatctgctagtgcagtgagttcttcgcatagccttccccccttggtccctggctgcataggatggaagtgggccgagcttaccctgcagagagtagacatggtggatgcccccttggggctcagctgttgtggtcagctctctctggaagctgaaggtagggaggatggagtatggcttgggtctctccttgctgccctttatgctgctgttgctgttctaggtaggctaggttgataaaggcttaccctgaagatgacaggttggtctaatggcttcatgcttctatgcagtagccattagccttctttgtatggactttaggagccacaggacagggtccagttttgaattggaggctgtctatgaagctgttgtacttagaatattgttaggatgagcaaaggaatgccatagatgccactttacagagagggatttctccagcatccttgatcaatcccttttgaacgaggcctcatgaggaaaggaaatataggcacggtctctgccattatggagtttgctctctaaaccagatgaaatctttatgagtttgcagactcacaatagcacagaaatggttcaaatgatgagcttgtatcttgctagcttcgttttactagtgagagttgtttggttgaaaaccagtgagaaggaatgaattcttctcttcagtttcttgtcaaaaggttcagatttgtttagcttgaatttctcataatgattcagctttcttgagacaatagaaacttgttagaggttaatgtgttctttgtctttttggacataagtgaaaatctgttacaagcaaggtgagtttacctaatgagccactaagagttggggagaacttgagtctgttccccaggaatggagagtgaggacctgaagcatatggggcaatggaatctccactgagtataggatggagatgcgtgggctgtactagaactgggttactttcaaaatggtgttcagcaaggtagcttcttctcagagaagagtgtgtgaaaactctaccaccaactaaggcagtgtgcagaaaggtgcaaaaatgtccccagatgtcttccttcctttcctgtcacagtggaggctgataatctcagatggccacgtgcaattaaaccttatgaaaagacaggactagattgggaagatgtgagtgtgtggtaaggaagaaggaggtggatagaatttccattttgatctaaatgctttgcagttgcataatgtggtgatggtagtggtgggaggttgtggtctaaagagggaatagactgtgagttcacacaaatttgcacttttgctccaggaatcggttggaattctatttccacattggctgttctgcagactgtgccatggagagtctactggtagccaggtacctcaaatgcactgaaatcctccaccattattttctttgaattaggagaagccttcacttttccacattcttcctttggtagatgaacaagaattaaagatacgagcaaaccagtgctgggctctgttgaactcccaggcctgtgaggttgttccctttttctctaatgaactttatgtgctttgcccaggtctctctgccagtgaggaaagacctttgcccttgtacttcatgtgaaatcacatggacaccatattaatctctggtaacctgtatggggcactgagttagtgggtcagttgcagggcagtgaccttaccctgaggattagacaggataggacatccgggtctctgaaggcagcgaaatgcatgacaacagagtcattccgaggacaggctggtggtaacttctggaagtttctttcactgaaagataaatagcaagtgagtaaaggaggaaactcaggccacttggattagattttaaatgactagattgctgggattgggtctagaggtttgcttgggcaatcctagcctggctgcctcagtgtcagaggacatcacaatgcaccgtaagaagtgggacgtggctcagggagaataatagtgccccttagaggaccacctggtaggctaggtaaaaggatatgggtaagacttttgaatgataaaattttgtctctattcaaaatatttgatgtgatcttcatcactttataggtgatcaaacacagagagattgtgatagcatgacttgtccaaggttaatggccgagtcaggtgggaggatgcaggtcttctggctgctggctgggcattcttctttgtaccctgccacctctgtagtaaaagggcaagtgcctgtcatctttcacaccaagccaatccagttggccaagataagccacttccaccaactgccaagcaaatccattcatacctagagaaaaggcagtggtgttacccaaaccaagagtgtttatcatggtgagggatttgatttggaaccctcatggagaagagatgggagccccagaggggagtttagcctggtggtggctcccaaatctgaagaccggtcactctagtgtccctttggaaaataaatccaaatgggtgttcgtcctcctattcctcttgacagccacccttcagaagtgggcactccaggagctaacaaacccctggtgaagaaaaggatgaaaataaactgaaacccttatgttgccatccaccagattttgccatgactgtgtgcgagttcacctgccaaaccccttatgaatagagcctttgccactctatagaagaacatctcttagaacagcaagtatctatcatgcccgggcaagtgacaggaatactccaccatcgtgtgtgtttgcatgcactcacatacccctaggtatgtagtttaaaagatactttgtccaaaatgctattaggacatgtcccagtgcccaacattgtgaaatctatttagagttaagaatgttcagttaaaatgttctgtactgttaatatttctcaatttgggtggatcagcatggcaaggagcaagagaacatgggggggtggtacccctacagtgtcatagataagggtgtgtgtgtgtgtgtatgtttgtgattgagaaatcatttgtctttggcaagtggggaaagggaaagcatgcaaacaaaacaatgtgattgagaaagagctctgctgagagaactttgtgtgatccctatcagaaggccgtacacagtggataccatatgctggtcctcatgctgtgggagcccattgactgtggctctagggaggctcacctgggtccaccacatggtcttgacacactgctgggttctcattctgggacttggaagggtgggtggctcggttttgctaccatctagatactgccagcttgagtgtgtaatactccctctccccacctgcagttttatctgttgtcagtaccagctctccagccttttactatggtcttaacacatcaacattttgatggagatagagggccttgttttcccttctgcctgccccaccgcccacagatccggcttctggctgccacgcctgccctgtcctgagggccaaggcccctggggacgttgcagggatggcgcagagactggggcggaggtggaggccagatcctggatccggcaatagcatgtatgggcctgacaacaggagtgtgggtgggcggcagcttggagcctctccccagtgctcggctccctgctagcgcacccggttccctgcatcttaccagctcccgtgctggctcgtgactgagctaggggtctggtgggagaggccccgggttgggggttgggagttgggatgggagcactgctgtaggttgggcctgtgaccggttgttactgggaccttggtcttcccaggggtgataacatgggcctagcccacctcacagaatcacagtaatggcaaaatgagagcatgtgtatgaagagctgcagatgactatgaccaccctacatttatagaatgatgttatccagtttcttgaaactctgctttctgttggggcaagacagagggaagacacttctaaagctgggccttaggggaaaggtgtgcatgttggggtgggtcattgcagtcctaagaacatctggatgccagagaagtatcttatgtctataagggcatcaatttattcacaggcttattcagagcctcctttgtgtcagtcactgtagtggaagttggaggtaggagagagaaaagatacaggtgtagccctcctgggtcccatgggctcgttcacagtcaccacccgggaaaggcagtgctacacagaggtgagcagaggctgtgggcctcctgtgaggtctgtgctagtttgacagtgagcattatgtctgtctgactgtcctgggtgttgcatccttcctccctctggaattggatctgattttttttcttggtccatgtgtcagtggtaaagcccgtggacaagaccaggaatgggtgcttcactggctgcagtccctgggcagagggcgtgatttacgctgtctgaggatccagggatgtgtttccatcggtgccctcctgttcccttccgcctgtcacctgccagagggatggctgccaagcccccaggtaggggatggccctgcctcttgtccagccagagcagcagcaacctctcttttcctttcccttacaggaagctgcacagtgggatgaagacgtacgggtgcgagctctgcgggaagcggttcctggatagtttgcggctgagaatgcacttactggctcattcaggtaggcaagttcgccttagtggcccgttcagatacaggcaaccatctcctgcttgcctttacccctcctcagagcctgctgtggcctgcatgtccccactgcccgctggggccctggtccatcttgttccctggaccctccctccaggcttatgacacagaagatccatcctgatggcggggccacttggatgaacccaccttcaagctctcgtgggtttcccaggcatcagtggcaaccagtgccctgtgtgatctaccttccaaagtagactgcagtttcattagtggaacagttgtggaattaggttctcactgtctaatgaatctgactattgggttcacattatacaggagcctttaattaaatggatatagaaaggttggaacacaaagctggttatagcgtgctgtcttttgcaagttaattttatacaattctattgaggtcgactgtgtggctgctggtaattttgctcatgtttgggcaaagctgctctgccccacgaggcgtggaatggggagaagcacctgacatttggcaggcccgagtgttcttggtggagggaaggatctagcaggtctgatgcggtggctttgaggcttaggtcacctgactttagttgtggaggcctcaactcttctttgccaggtgcatagtctcttccctttaattcccttgccttccaaccttggagtcattttttaggggagaggagagggctgttgtttcatttggtcttgtcttctcctcatgtaggccaaggcctgcctctcctttccccatattggctccagaaactggccctccaggcagtttggcatttgggaaatgggctttggggtcaggcagagaaaggttcaaatcctgtttgtaatatgtgctgtgtgaccttagctacattcatcttgtgaacctcagtttctgcatctgtcaagtgctggtgttgttaacttacataattttttggaggattaagtgacagaatatacgttgaaggcatctgtagtaagcccctggcatacagttggcatttaataaatgttaatggtttctgcttgcaccttcctccctcatccttgtttctgagcctgttgccccggggggcgtgtccccatccgctcgttccctgcctgcctggccgtttagtactgtctttcccctgagcccatcatgggtacagtcgtggaagtgctcttcgttcgctttttctgcttcagctccccactgccttgctgcagggcccatgtggttccgcattgtgttggatgtggtctctcccccggccctcatggcccttcctaaagcgtcctaactccttctcacttcccattcttccctcttccaggcgcacggatttgtccacagcaggcagctggcagctatctctctcagcgcgtctactgtccccatgtcttcgtgcattctgttcttccttcctgtgggccctccccaccctgcccctggctccactgaatcatcctcctcctgcccatgtgtctcacctcagcccagagccctaacttccaggcatttctgcgtccggatctgcttgacactcacgtacactttttcttctgttttagggacttacaccttgtatcttcatgcttcccttcagctttgtacgctacttaaggttcagagtgtggcgggtttcatgaactatctgcctaccaggttggctacccttcccttgctttcttggtcttgattttttctgctttagcccaccactgccttactgcagagtgtggtgcgtcctgccctagacccctgtgtggtgctgggcacttctggggcagtgcacttctagcctgttggtaaagcgtctttgccctctcagccgcagtaagcgtcctttcttattgctctttccttgagtccagtgctgtagccagactcattttcttggtttgctttatgggcttgttgctttctgggctctgtggctttgtttgccccattctgtctacttggaataacccatctcccatcttcccagatcttccaaggtcccttccatgatgccatccccagctgttccccacctccagccagaagcagtcgtgccttttctgtgcccatgtttctttatttgaagctatctttgggtgcagtttttcttctgtgttacagttatttatggacttatctctcttacttgggaggcggggttacatggtggaaggaatttggacacgtacctactgctgatgtgatctggggcaagaaccataagctcttacagcctcagtatcctcatctgtaaaatgaaaatatttaacgctatctcggagaagctgtgaggctcaccttgaatacataccaccatagctaacatgtcatggggttagatcctgtccacgttatgtccagcacactgcctggcacattattggtgccaagaagtatttgttgagtgaatgatgcagcctgggatgccgatgaacagggacactcctctctccggacaagtccctcctgtggtaggaactgtttatgtcctaaggactcactggaggggacagccaggagcccctggctcgtattgtatccctcttccaggcggtgtgacccagtgtgagttagccagtgtctctgctgtgaatcacacatcagcagcattggtggggctggtggaagcggctgcagaaaagaaagggttgcttgcatactcatgtcaggtgggcccggtgtccccagttcagacaagagtgtgactgtgcaactgccctgcggagctggcggttccctggggaagctgactttggttccacctgagatgctgcttccaggtcccctgatctcatatggctgctccagaggctttgggagttgggtcctcttttcctagtttttcctttccatgcctgtcttactgggcactgaaggctgattgtgtcaaatgatttgtccctctgctagtcacttgccaatgcccttggaaaggatgatttgatgattaggcaggtgcgatgagtcatagtagtgttttaattcacccttgcagatagctcacggcctatattctgatatttctattcttttttttctttctgttgtccggcatactcctcacctccgtgctgagaggtcttgaaaataaaatagcacaaagggcttagtgaggctagaccatttcctgaattgtttggccactgttaaacaggccctgggggcctctggagtgacctggacttgttggggagttggggtcagagggctgggctggtggctctgggtcttcttacagattccagtagtggtttacatgttctgatgcctgaaaacagaactaggtgatgttttagaagagacattgaattagatgatgtgaggttttcctgctgctctattttgaaggttccatgaagaaagctgacagtgagaatgggtgtgccaggtctgtagagtagacccattttacagatgaccaagggttcaagcagcccacagcctggaagaacagtagttgctccagaaccctgggcgggggaggcgggggggaggcgagcattttttttcaaaaggcgcaggctgtggagaagtgagtccaggatctgggtaggggttgtggttgcccccctaaatgttgctgcccttgcactggcacattcctgctgttttcttctgctcagcggagccgaacggctctcacttcctggctagctctgtgtgctgccccaccccctcttggcgagcattgcctgtgtttgttattgtagtcctggctccaggccaggcctggctgcgagccagacttgtgggtacagtatgtacagtgagtgctgagccaagtttgtcatcatacaccattaattttttttttctaatctggttggggtggggtgaaggaggaggcaagaaaagagtttctccgatgcttgagaataggccgcattgaattccgcagagatgtcatttctgaaaggcagacggagctccggcttgttcttccttcgcagtttttcctcctttctctccctgtcgtcctcctctcctcttcatttccctatcacgcgaaatcagcctgcaggagatcgacaatgcaggtcttattttcagtgactagaatactaaatttacactgctaaatcagttttcattgtgttgaaattgacaatttgtttaattagaagtttgccctgtaggaggcccttctgagagacagtgccttccctttttctctctcccttactttctgttttaagggtttttaaaagagcctaaatggtagtagtgaatttcagtttaattgaagttttaatttcaattcgaatgtgtgaattaatcaagtgtttatgggctatacctgatgatcacaataagtttaaactaactatcaataaccaaactcattaactaatgagatgatctggccaggccctgcattctcagaggtggttttgggggtcagaagggtttgcgtgttggggaaagaggcttggggtgggaagagagatgacctccaaggctttgcaaagctagccctgatggagggtgaagcttgggtgtaggactgtggcccttccccttcctgtgtcccaggaagactctgaaacctccctcctcaccctctgctaccttaccccttttggggatctggcattgaagcatctgttgatccactgtctcttcgccactccttgtcgtaacacgagaagtgattcctagctctgaggtgtccatgcagagaccacagacacatgcagtgactcaaattggttctgagatgggccagtgtaaggtttcccattaggtagatttcccacagcttggcttaacgtcctggtggcttataagtgagcatgcctagaactgcttgtccctatttttgactcggctgcatacgattagggtttgagtattcatgtggcctgctcctattctgggagtgtcattcatttttggagccagaggatgtttaataagcacgaattgtgtgtcaggctctgtgcacttaacagtgaagactgctacaacatccctgccctcaaggagcttaagtctagagtgggagatgagtatgactatgcaatcatcatacaagatggtaatgtgtgcaaagtgctaagaaatctaggagaaattcagagtaggagagtgttttgtgccagagggtaacagaacagcattttgaaaggactcggtgaggggaagccgaagccacctatggaagtgggtggtgtaacctgcgagtgtaggctgggcctgcagggagagagcagagtgcagggtttagaagagatggacgagatacatctgtggaaggaatagcaaaatgatctgcattctccctgaagcactggagagccactgaaggactgagtaagagggtgacatatttttgtgtctggaatagaagggactgttgggcttttttttatgtagactaggctagaatataaggtgaataaagcctgttggagaacttgaagactggccgtctgtgttggggtgtggctggagtgttgagaggcctgtgccttctgtgctggttagggccctgtggccccattctgccaggtgggaggccccatccttccactcctctcttgcccttgtcaggcactgtaggccctggctgttgagaagcatccctgagatgaggctcttccccagagttagagccatggggaaagaatgaaggctttcgttgatagattttctgatttcagcagcagcatggagtggctggggcttatcacctgggacctgggtcatcctcctggcagggaaaagggctggaggagtccttcagattggatctcttaggctttcctctgtcgcggttggacggaagaagaaaagcattacaagatggcaaagatctgtggcttgtccttgttctgttttatttatttattcttttttggagcactgagctgtgggtttcagtttcttctcctcaaagacagagaagatgggggaagagaggtagctggaaaattccctgtgactgggaggagacagtgcgaggtggtccccacgctgatgatgggagaggtgcctttgagtccaaagatggcttcccctcatcttgtctctcctcccattcacctctctcctcccagattaggtatctgctcagagcaagagacttggggctgcccaggcttgtgagagcccatggccaatccatgcaccctctgcccactctccagtcaataccagctatcccttctggttagcttcctaccatcagggcaaacccgggagatgaccaggaagaaacttcgttcatgttccttgactccctccacattccttatgtgggggcgcctttggtttttgggtcaaggaagtggagaagatcagatgggggtggctcagaggccaggctgccctcccttcggtccgcatgggtgatgcggatgcagagagtggaaagggtgaagggagccactttcccccagctcgctcttgaacacacttctctttctctctctctccctactctgaatttggcttgcttcccgaactttttcccagagtggtgtcgtcactggcctgccggcaggtctggatgttctgccagcattccagagagtttatgatcgcttgcagatgcgcctccaagaacacactgtacccaaagcagaaattaatgcaggcttgactaccgtccaagcccgtacacgggagagaggaaaaggaaaacaaaaactgtttaatgctgtttataaattatacactggctgatgaaaaatacatttctttcctctccccttttactctccccccaacccgtcctcagtccccccccaaccccacccccaccccttctcgctttctgcctcaagagcctaaactgagaccagaagaatatggttttgctttttagctcctgttttggctgggatccgaaaccctgctgctgattcacagccagagtatttttcccctttacctgatgaaatatactgattttccagcccagatggggtgtttttggttttgttgtgtgggttgtttttgttttttttggtttttgttttttggccagggattttgtttacagcaagtatcaggttccatgatggtgctgggtgcgatgctggccccagggcagataaatcccccacgtaactgccaccttagtgctgcggttttgcgtgcctgggtcccccggtcctagtcaggccagctgaaccgagaaagttgggaaagttcattgcaggtcatggttttaaacagtgttttcaccagttctctcccaccccttcacctacagcccctgtgtgaagagggggttcacatgtccctgcccccaaatacacatgtctctgtctccatatggtgccttagcaggggttggggaagctcgttccatctacccctctggatcccagcatctcctcccaccccgcaaatcccccatcccaatttattctataaatttgtttccacattatgtctatccatttacatggcttttgtgttttttaatactgctaatgtttatcgtttgcccaacaggctcgacagattttgcttcctgtagagcatcgaggctttagagccccctcgttgctaagtagcagtctccctgtactgtaatgggctgattttgtattctgttcagcgctgtatcttatttttgtatgcaagacaaagtgttttgatggaggacgattgcggcagtgtctggaggctgtttggagttttatgggctgtacagtacactgtgtgctctctgaacagaacacaggctgttgaattttggattggatttgtcatttttcccccctcagagaggagcctgtcagatagaacattactttgagggtggagggaagaaagtggaaattatgtaataaccttcttccttctccctctctcgatgatttttctatctcagcatagggtggtttcttccacacaaaccctgtctcatgccaccacatgattttgcacagctagaggatgacggtcttattaggaaatgaatggtgccctagagggatggatgctgggacatctgtctgtctgccatttattctcctagtctccctttcctctcctttgctcctgccatccttcctacgttctgggttgccttgctggtccttgttattgtctgaggatgaatagatatggggttattggggagggatatttacgtgggatcaacctgataatggcaatgccatttctgatttccagggccttttcgtcttcccttggcttcgcagacacacaccctgccggaagcgttcttaggaggcctggccgtgctttctcttgccctcagccccattccctagccctctaaccaggctgggcctgggtatctgtatccagggctgtgcctgaggggccccaccctgctttgggcatccatcacgctactgcggcccttactttcagtgctcttgtccaggtctctgtggtggcaggtatttatttttcagctcttctcttctccttctatttctccccaatctgctttcatctcacttcatctctttgtccctgtcctttgtgtctgtgtcagcctcggccttttcttgacactcctgtgtattttctgtcttccttcttatgtcttcatctgtctttgtctccatctgtcttcgttggtcttttctctgtctctctctttctctgtctttgtctctgtctctgtctctccctgcctccctgcctccctgtcctaacccaccacctcaaagttttttttagcttggaagctgggcagtggttggaatggaaaacaaaatgtcactctggcccagaggtctccccagaggggaggactcttgagccagtgtccctagaatgctcccagcacctagaatctcatgtgctcttgtcccttgcctctcaggggccagagtggggcttctctggcttggcccctgcttttcccaggtccctggatgttccccccaaatcccagttgtgttgagaatgggcaagtagtttagcagggttaggctttacaaggcccttattggactttgctggtactgtgctctcctgggccagtactgtgcacctgagtgcaggactcagcagctgccctcacatactcatgccctagcaaagtgcctggtacataggagtgttgtgcactgatagtatctgtcaaataaatgaatatcctgttataaaagtgtttgtactactagggcagatctgggtttggtggggcctgaagcgtactcagttttgggtgctgtctctcagaaaaggattataaataccaggtgttagagcctctcccaggaaaggggtcagtgccagggagaggcctgaagcttcagctttactggcttccgggagaacaggcctgggtgaaccacttgagaggttgctgttgaggggtctcacttggaactacttagtggggtggctcagggctgaggataggagggtgtcatctgcccagctctggggaccttcagaacctgggacatctgtgctcacaggcctcaggtttatgttccatagaggtcaagcctttggcaaatggctgcaggtcgcaatgggcctggaaacatcatggtatttcacatgctcttctcagtgaggttgcttggtagggatggaccctgagttccagctcacccagagcaaccaggtaggcagccactcttggtagcatcctggcctccacactaaccctcggtgactgtcagtgaaatggcatggcattcactcctctcccaggtgttcaactgcctaggtctgtggctgtggctctcctgcgttcttggggcatagaactgcaagtatcgtggggcagaggactggtctacgtgtgtgtgtgtgtgtgtgtgtgtgtgtgtgtgtgtgtgtgtgtgtaaccatgagggagagggggcctggaggtgatggaaggtgtttgcagacatctgggcatctgttctgtggagcttgcagactcatccattaaatgaggttggtgaagattgcaggattggacagtcctttgggtagagggactcacttgttggagggtatggaaaagctgcagtgtctcctagaaatcggggacacagtcctaatcagaacaccatgtgtgcatgtgtgtgtttgtgtgtccaagcatgggaacaaaaagagattgagaagaagcatttacatgaaatactcaaatttgttcctttgctgtaatgggcccgcacagaccattaccttgaagatttaaaaactaaatgagctcatcatatcgagtgacttctaccgacattcatgcttgattgcaaagcctgctttacctttgaatttcaacttcattgtttgttattaattctcagatggtggtggtgtgtttctaccttttggattcagccatgaaaatgttgattttgtgtgatggatgtgaacatttctcaacaagaccccactgaagaaccttttcattttaaaaatagccccatgacctttggggctcagactggagtttccgaggaatccagtgggctgaggcaaggcttgggttgactttggagggggcagaagtttgcatttttttgtctaataatttgagtttcatatgaatgattctgtgctccgtgcaatactatgcattttcataactgtctctttcactttgggtaaaggaagggagggaaaaaataacagcagcagcattctgtgggcaaaggaagaaaacaagagaatggggcagagaacaggctaaatttaaaattgtaattggctgacttccactggcttgcgggtgttttaatgactcataataacttcatttaaaaccagctgagcagaaaatagattggagaggagcctcgggccattatggatttgtggtttttttttttttgttttttttttttttttttttttgacaagcttggttttcagcagccaggaaggctctcagagagggcttggctgtgttttctctctctctctctctctgagggttggtggtctgcccaggagagattgtatagaaaccagggcgagttttttttttttttttttttaaattctccctctaccccttgcttttttttttttaactgattaaaaatagatgccttgaggtattattttagcatcagtaggatttttttcacctttgatgtggtaaatggaacataaataaaattgtttttgaaattactgaattaattaggtagtaaagcaaccacaatgcataaatgtccttggccgtctggtttttctccctaaccctgatctatatttgtagggcgttcccttttctccccagccccctcctgctctcccagcgacccctccttcctctgagcctgcaccttccctttgaatggcaagattcttttatcatcccggcaacagctaaatgattttttaaaatccataggattttgacagtattggttctatctggttatctgatcagctccaggagttttgggacttgccagaaaaggctctaacctggctctagttgttttaaataggtcctgcctgtttcccatgctaggcctggtgcccgaccggcgagcgttcctttttctcttctcttttgaaaagtcagccgactcagccctaggatgtgtctgtctgggcaggacaagaggccgccctccatctgatcgctcttagccatttatctatcccctcttatggcacctgtcaccttctttgttacatagctatttatttgcttggccttttttgcctactagactgtaagcttcttgagaacatgtgatttatttgtgtcccctatactacctcgcttagtaacctgaatggtggttataactcagtcatttgaaaaataacctaatgggtgagtgagcaggcatgcggatgggcacatggtaaggaacagacctgaggtgctgcctgcttccctccagccccaggagtcagcaatctggatgagaagacaaggatggaaggcggggaccttgtcagtagtgtgctctgttgcatcctcacagcgggacacatagcaggctctcaggaaatatctgttgaagaagtgaagggctcaggatgcatggtttggctgcaggaaggagagaaagacatttattgaaacttgctgtgttccaggcacagtgctatgtgttctgcatatctgaactcagtctttcttcaactttggaagacagatatgctgattccgttttgcagatgaggacagtaaagagttaacttgcctaagatcataaagctagaaagtagcagagctggacttcaatctccctctctttctctctccttccaccctgtgtcttgcttttctattatagtatagcatgctgctatacctagccctggcctcgtgctgtttgagtgcctaaatgcctgcttctctgtttgtagagctaaccaatctcaaactggggagctgagaccaggaaggccctgtgcccaagggtcctgggggtggggagggtggcatagtaattggctgctgcctgtgtgccttgcacctgtgccaccaggagcaggtgtggcttattagcctcttcctgctctgccagaggagcatgtgttcagtggttgtgagttgtggctatgacttctgctcagtgccttgtagggttggggataggagggttctgggagccttgcaggagggtctgtgggttagtgtgtggccctcccacccagggagagcttgactgtgtcatgccccccactcctcctttgcactatcctgccaagtaggaggggtaggaggagagagctgcctgtggtccctcctgcatggcgacgcaactgggtgctctgcttctggtagatgcaccctgtgatgctggggtggggtgaaaggggcagccgacctgtgctgcagcccagaaatgtgagagctgtgaccacttgggctattactagcgccttagacttcaagcgtcttggagtatgatgcatcaggaaggttgggcctccctgacctttcagattatgtccagtgaagctggaccacttgacatgaggctggttgtgtccattctctgacagcctcatcttccccaggcacgcgctggggatgctggagctttctctggggagcgaaacatcagccaaatgggaaccagatggtgaaggttgagcagcagagaaacctcgatgactactctgggtcacacgtgtggccctcttttgcaggaaatcgtttgtgaagtcattcatcagttagcaactgaacctagggccagtggtgtgcaaagcttggcagggtggacagaggggttgaagccagtgtccttgtctgcaagaagctggtggtctggctgagagggtgacacgagccccctggcaagagaaggcgttgagcaaggctgggtgtgctcattgtgaccgcaagaggaaagactgagtgctgcaggcatttagagtggggagaagctcctaagaaccaggggaatgaggagagcttcgggaaggaggttcatgggattttgatgaggtctttgctgctggagtatccagaaggagtgctgtggtgggagtggcctacctttctggacaagaggaagcaagaacttctgtgagctagaaccatccaggcaggcatctctttcctcctcatcctcctccgcccatagccacctggcagagacttagagcccagtttcttgcacttgggagtcctccaatccctgtgatggctgtgggcctccttggcctggaggttgagaaacactgcattaaagatgaaaagctgccacttcagggggcccctccaagttgaggcatccataaaacaaacacatgtgaaagcaaggcttaaaattggatgcggacccagaagattgtaaatttctcatataggatttgatggactaaaaaatatgttacgagtacctagaaccccacaaagcctaggttgagaagacaggtcagagggctgcctctgggtgaggctgaggacagagttggccaccctggagggccaatggaggaagcatccgaggacggtctcaggacgtgccccagcccacctcctcggaccacgtgggtgaagcccctgtgtatgcctttagtgaagactgagcttgttcaccgcgtagatggaagccagtgggagagaggggcggatacctctgtagtcaggggctccttttgttggctctctccaggattcaacctgacaaagacatgtcttccagacttttccccagtagttaacgcactccctcctccttcccccaaaccagtcccgttttgattggaattctttcacttgcctgggacaaggggaaaaaaaaaaaagcaaattctaaagttttcattaggtagttgggataaaaagtcttctggggtagttggattaaacttcagcagctctcttactgactattataagctaattgagcacagggagctcattggcggctgcatttttgttggagtaattatgaaagaccacagtcattttcagtaacaaggtaactccgggtaaagacagaactctctgaaactttggatttgctggagtcttccttcctcagttgcctttgctaatatgagcccgggataaaggcccagagaccagatattttgggaggctactatcttgcctgaatatcccggatctcccagtgccttcattggggcctaatggacataatccagcacatctgagagagcactgctggggggccagttttgcattaattgagatttggggtctggagtcagaagctctggagtataggctcgagagggacaggtgcagcctttgaagctgacccgggagcaaagagaatcacagtgcactgtcttcattacttatttatgcaccaagagcagggtctgattatagataatgaggccgaatgatactctctgtctctaatgaggtcctgtctgtcctgtccgagcaaagcgtggaccagcgtatgtaggactgtgatgacaaccctggggatcttttctagcccataggattcttgatggggaaacattcctagacatacagtcctcccactgaactccacccccatccagaatctctatcaggagctaggagccggctcagtgggctgggaagggcctttcagtgccctttggacggggccctggggccttgccaagctgaacgtgtcctctgggtggcctgcctcacctctggcctgctgcccatcagcattgaatcatgcccctcagaggacagcatgtaactgtgcttcccgatatagcccccggccccccaaggtgacaggaagagtcattgtcacgggagtactccatctttctgacaccacaaggccggcgtggctttcttccctactgctcagccctgcacagcctagaattctgctttgggagcatacatagagttcacagagctatttttttttcctactctccgtctcccactttagttttcagaactttatctcagtctctggcacggactatctgcttccttcctccatctcaacattataaaagtttgtcacagtcagaggctggctgaatcgaagcagaaatgtggtgtttggttaaattgtaaaattagctaggaaagttaatgaggcgttccgcctctgcctgctgaagagcaggacgtttatgaaggtgcttcaaagcaccctgcctgagaaggaaggaaagggagacaggagcagcaggggaagctgcccaggagtgtagaagagcctggtccaggtgagtttccaggccttggacgtgcctttcactcgcttagctgaatggaacctgagaaatcatcccctcaatcctcctgctgtgggtccagctccatctacccactccgagtccataggagttccctactacatgtccaagaatgtcctgcgaccgcacacagctggccatggttagccattctagtgcccagatttcctttttgtcctgggcaaggcagaagagacaaaaactgaacactttgccttagaaggagcccatggtagaaaggaggaaaccagagataatgacagtggcagctgacatttcctggaggcctacaggtgccaggtactgtgccagattgctttacttcgtcatctcatttgagcctcacaagacccatttcaagttggtactgttaggacatccattttacagatgaggagactgagtttacttgcccaagatcacctagcaagtaagagacagagctgcgctgtgaccccagggctgcctgaccctgaagcccctggtcttaacctctgcggcaaagttgtttccatcccctttccaggctgcccatttctcccagcccacagctcacgtggtacagattgcacgtttgcagatgctcaccctgaagctttggaagtcacggtctcaaaggtgcacgtggaagagctgccaacagtctatttcctgcacacaccaaactcgcaggtcttctaattacaccaaacaaacctttctgttttcaagcagctatgggcttaatatggcaaatagtttcccacctggacctctggcatgggaggagccagaaaagacgagttttgttttgttttggtttgtttttttccggcagggaggtggttcgtacttagaataggcattaagtgtggcaggcaatatttctgttttgaaaagtgtggcatcttaaggctgctgaattttgagcctgcaaatgtcagtgccgtagttgtaatgtaacacctcaattatggtgcagggggtaaggaagccagactctgaaacctgcaaggctctttagatccacagcctgagccacaattaaggtttcagaaacaccaaaggcaagccaatgagtgtcatttttaaccagtttgaacattttactacttcctaacatcagaagcacccgggctagagagcccgcttcttgtcctcaataaagtgattaagctgaatgggtgttggggagtattattaggctgagaagggctaaaaatagacatgctctgttttctaaaagccacagcaggcctggagagactggcagcatcgaggtgccactgaggggcccaggggaggggaagggagggtggcagtctctggagctccgtgtctgagatggggatggtgggtgttgtgacgggtgggtcaggtggtggggcctctttcccagctgtcaccaagagtggaatcacagtggaagcacatccgtacccgtatatgtgtattaatgactttaaaggaactgacaactctggagtctctaggagggatgcctaggcctaaaatttacgtactcagccccaagataattgaatttacctgctgttctgggagaaggagtccaatctgggcagtgagtaaagggcagactataaggggcacaagaagagggacatggggaagagcagaggcctttacagccgagagtgaggatctgctcgacaagccttgattaactaggatgctcagagaagatgtaatcaaaggactttttggtgaactgaaggttaaccaggaaaccttgtctatatcggcctttgtcgtttgctatcattcatcaatgtgagagtccatttttctactttcagtgaatgcaactgattgtctttttatgatagaacatcttgcttgcttagaagtcaaaaggagaatgcctaagaagggagttaagcatggaggtatatgcctagagttttattataagtcactctagaagatcgtttgtacgttttccttcctacatgttttcatacctttgaactcattcctctctataatagctttaagtgctgggaggggcaaggaacatgacttccactttgtagatggagaaacaggccaagaaaagtaggatcttagaatacactgaggtctacgcagaggcaagtctagaccctgtgctgctcccagcccaggctctgtcggatagacagtgttgtttcgtgcctggaccaggaggtgagagtttttcttaataggcaaaggactcagagaagagagttaggtgggcttcccatgctgccattctgactgaggttttttttttttttcttttatgtttactagctatgagaccttgggcaagagaactaagctttttaaacttcagtttgcatatctaaggccaggcatggtgtctcctgcctgtaatcccagtactctgggaagccaaggtgggcggatcacctgagatcagaagttcgagaccagcctgcctaacatggtgaaactccatctctgctaaaaatacaacaattagccgggcgtggtggcatgagcctcctagcatctctctccaatgccacttgcaactgtctttgtagtgtgtatgtgtgtattttgtttctaagataaaacatctctaggtaatatttcaacaaatgaaagaaataaagccttttagaaggctcctgatgctgtcacaaatgtgataatcattgcactcttcaagaaaccaattggcagagctctgtatgcaagttatctgctgacaattggctgtaagctgtacaagccctgtagatgagagcttctcttttcctggaaactccaccaggaagccgtgccatagaccccaaagacatccaggtcaagctgcagggaagaggcagggttcagtaggcatagaaggctgtctaagctgggcccgtgctcccatcacaggcagtttagtggagaacctgggctggatgttgacagaactgagatgttagctcagctacccactagctaaatcaggagcgttagcagcttaactctctgagccttggtttcttcacctgttaaagagatgatgatacatccttcctatcctaaaagcaggacttcaaagttgcacaacagcagtgacaccactcactcagaaatgggactgtaaggttgttgaaggtttaaacaagatgatgcacatgaaggtgcccagcacagaaagtggagctcaacaggcacacaacaccaatactttcactccttcccttccaaggaacctacaaaggctgccctgcaataaggagtcacaatgctgctgctgccatagtgttgacagtcatcacaataaaaatactaataacatgtgttgcccattcattatgatgcaagcattgtgctaactactttacatgcaatataccagttaattctcccaacaactctaagattaccccccattttatacatgtgcaaactttttttttttttggagacagagtctctttctgttgcccaggctggagtgcagtggcgtgatttcagctcaacgcaacctcctctcccgggttcaaatgattctcctgcctcagcctcccgagtagctgggagaggacaggggattctgagacccaagcaatgaaggaattatcaatattgagatgccaaagagatctcagcattgtgagaggactcggcattctcttcagtcagtgggaaatgagagaggcagggaccagcctggagaaagtgagggaagccaagaatgccatcgagactgaggaatgctgcctcctattccctttaaaatacctccaatgaggtatgtcatttggcaggagtgtcaggagatgctgggggaccggggcagggccaggttatcagcttgaaatgggtggagtaggcacttggatcccggccaccacccttggaggggtcttagtcttcttttttccattgcccagccagtattgtgaatcctactcaggggagaggggtgtgtgtgtgtgtgtgtgtgtgcgtgcgtgtgtgtgtgtgtgtgtatgtgtgaaatcctccatgccatatttagggtgggggcctgtgacggagcattctgaagttgcttcagaagaaaggagcagaatagatgaggatgagaggagaccgaaggctcagatcacaggctgagctttgggactgctgggggccaacagaaacttctcttttcattctgaacttctctcctgagaatccccaaggggagacctgggaggagggtgattgttggtgtttaggagttgcggagatgtcccataaaatcatggcagaaacccttactcttatatccctggctttattatccagcctctcacaaatgccaaggttgcaaagctatctatctctcttaaacaaaacaaagttatgaacacttgaaagcccaggtattccctggaactcgggtcagtctttggcacagccgcactgacccagcctgactctggctaatgattctcccaatgtctggactctctgttccattctacctgcctgatagagcagaatattcaccttgagaaggattctgctggctgaaccggggaacccagccctcgcttggtctcaacagcaccttccaaacaccaagggttgtatgcatttgagctctcgtgtacggccacgtttaactttctttgccatgagcgcccagcttctcatgaacacctgttcatcctttctcccttagagatgtcccagtttaaaacttgtcatttcaagatggagagataaagggattcaccaagggttacacagctcaggcagtgacagtcaggaccgcaagtcagtttcttttggtactttggaaaatcttgggtgcgctggccagcagaaccctccttgagccagttatctaccctgtcttacctaagggtggtcctgtctcccattccagatagcataatatcatgtatacgagagccttagagaacatagtgtctcatttatgcaggccatttacttattgcgattgggcttctcccagagctgtgggactggaaatactatgggctgcataccctgtaggctgtggccaggagctgtcctcctggagctcatcagcttgatgaagtgaaattattctataatcatgataatgactgtgacttgagcacctgctatgtgccaggtacttcatatagtttcttgtttaagctatcatatgaggatgaatagctacattttcaggagggaagtgaggctgcgaagttgatgctggtaccgtaccggtagaaccttaaagccgtctctggatttgagctgttgctgttgccaggctggagtgcagtggtgcgatctcggctcaccacaacctctgcctccggggttctagcgattctcctgccccaggctcccgagtagctgggattacaggcatgtgccaccatgcccggctaattttgtatttttagtagagatggggcttcttcatgttggtcaggctggtctccaactccagacctcaggtgatccgcccgcctcggcctgccaaagtgctgggtaattacaggcatgagccaccgcacccggcccgggacttcattttgagggggcctgaccgttaacctccgagagatctctcagttggcaaagcatgtctggaaggaagtctggttcatcacagcagggactgacattcctgtagtaagagagattttgtgcccttgtgctgactaccacaataccatgattgctcagtcatagaagttgccaggagaagaaagagattagaagcaatggtaaggtgaacccctgagtcactactcttagacttcaggaatatttgtaattttttttggagacagagtatcactccgtcacccaggctggggttacaggcacaagctattgcacctggcctgtatttttaaaaaatctgcaacaaatttactatcctacttgcattttatttaaaataattcactcatgtatttttaaaaacataaatcatctcaaactggtttgcattccctggttcccttctgggtaggcagtaggagggtaataataccattaaacattggccatgagtgatgatgggagcagacggtaggggtgtcatttccttgatctcctcctggggaagaatgatctgaccccatctttactggtgtgttttggctggagaggtaagaatattttaaattgcgtgatatatctcttgcatgcatttgatgtttgtgtgtgtcttataccttgctattattttatctcctgatgacaatgatgatgttggtcttaatgacaactagcatttattgggctattattgtatgccagacagggtattaaacactttacatatattatttaaattaatcatccctcaaccaaccctgtggcataaacactctgagcccagttttctaggtaagaaacaggcccagaagagataattcacttcttcagggtggtagctagacatggtagaactgggacttgaaccagagtttgtttgattccagagagcgtgctcttcactaccttactgtgcagcttaatattgagtgcatgtgtgtgttctggctgtggacagtgtttctaagcctgttggattacccgctggtgctaaaaggggtaacaaaagagctttccaagccactctggctgagaattgagttgcagggataagggacaaggtagacctgtgtgctccctgtgggacttgagagagggactgcaggatcccagtaagagacaagggcaccatgcagcttcctagtagcatcacatttattaggtaggataagaaatgttccctcagccatagagatgtctcagcatttcctcctgacccagtccagggtttcctcttctgcagagtggatatttagccacacatgaggtgtcagtcatttgccaggtcactggtgggacactggcttttggagatctaaaaaccacctgtcctccatcccaggtgactcccgttgttctgttgctcagcccaggagaattccctggtgtctttctccatcctatatttatgtggggtcctgtatcattagttcattcaccctcccatcttgtagtgagtgaggccgaactctgaggatctttccccacagccttgtcaaccacagctacccttgaaccatatcctggacctatcaatggggctggttgttttcctttcagccaggatttgctcacctgctttcccttttccctcttccctgaatctgtgtatcttccagaaactctggttctggatcagctttttgttttgttgacaaaggagaaagagcaagagagagagctagagagagagagagagagagagagccttcaagctcctctctgggagtacacatctccttgagggaaagaacacacagtgccggcctttggaattggcagccagtgtgctgttctccgtctgataagaggtactgtaaataaaactgtacaccatggcctgttgtaaaatgccctgcgtctgtactcattgttctgacagcttatgctttttttgggtctgctgttttggtacactctgtacttccttatgtaagcaggcgtgcagatctcatcagaacattcaagatgtttattttaaaatctcaaggaattttgaaaaaaaggacacaccactcaacattagatgctggcaaacattaggtgttttttcagtggttcttttttttctcccttcttattattagcatgggggtgggagaggctttggagagggagggatttgaattttttttttcttccctcattggcttctgccttatttccttcagagagacaccaccccatatctgattgcattcagtgtcttctgcttccttcctggatgccgggaccccctcagcctcatttctggttagggcaggtagggagggaggttctttgacaagggggagagggcagctgcagggagcttgtcatggcttccactggatttcagctttattgtcattgggatcctgggcatttagagaaagctttatgtttttgaaagtgccctgctggctgttccctcctttgattcctgtgagttggggtgatccttggcacagagggagagctgctcccacacacggaggcctcagtcccgcctctggcatgtgcgtcctgtctttccaccgaactttaactggctttgaaccttcctccttcctttatccccaaccttctggaggtgtcgggaagtcagggaaaaaggggagaagagtaggagtctggagaacccaaaatggtcagggagctccctacagggtggtgcttagaacatcccgaagccctcatctgcagggtacctgggagactggtaggggcaaggatgtccgcctgtctctttcacaactgggtacctggaatctcagataaactcagtgcctggggtagggagtagtcactcggcagatcactgcctggggggcaggaggctcactgactgtagcggagggaagggttgtttgttggctgccacagtgagcattggactgggttgggagcagacatgctgatgagagggagatctcacaccagaagaagcagacagccccacttcctaacctttcctcccttttcctctcaactacctgagacctagccagagaccatgtccttgagttttaaatagggggtagtagagaacggagtgtgcagaataaggactctgccaccccctaggggacagacagcttggcagtgccctgagtggccattgcgcccttcccaggtgagttctgcacccaggaacctgcctgggactttctttgtttaacaagcatttagtgggcacagactgtatgccaggcatggcgcagggtatcagggatatggtaaagcccaagacaggtgggaacctgctctcacagagcttacagtccactgggaagatggaagagagctccaaatacaggacagttgaatggggctccaggggcttgtccagagaagatttcagagccaggttggtgaatagctgctgatactgacatattggttcgatggcagatttttctgctcccctcaacaaaacaatcactcatctttaaattagaggaacaaggtggggtgtgcatgtgtgcgttcatgtatgtgcacgtgtggtactgtgtgtctttatgaatgtgagactcactttacacaagataaatggcccccaaataactgtacatccaattccagtaaaatcagtcatactttaattgcatgaagggagctctttctttaaaggaaaagtgactggagaagatggtagctgcgacttactggttctgtatatctacccaccagctgtaggatggagcactttccccaccttgtcgcaactctccaagggacctccccttactgcttccattttacagctgaggcaacaggctccctgagactggcagcttgctgagggtcacagctggcgactagcttgcctgggatttgacctctgatctgtctgacccaaatgttgagttcttaaccacactgcactgcctcctgaggtataaatggcaccaaggacctctgctatccacagaatgttttgtgattgacaaggagttttgtattcacttatgtctattatcctgtttgctcctcacagcagcctcagggaggcagacagataggcttatgcccattttacagattgggaaatcagttcatcaaggtgtgatgactagtgtgatgcccacagctgtgagtggccaagttaggcgtgggatctcgtgcctgcacctctagatcctgctatttttctcggtttgcttggatctgtgattgctgtggttagcaagggtctagcgcactttatcttctgctattctccctctgctatttaatttctttcccgcaatctatcccttaacttcccccagccccgcatctcccacctccatgtcactccatcccgtgcagctggcctccttgctcctcttgccttgcctggcgagggtgttctcacgtggtggccttgctctatgcagatgtcagtgcatcagcaagggcctccctgactacgctgtgtaaaagaacagcccctggcactctctgtttatctttactcaatgctttgttgttgttattgttgttgttttgagacagggtttcactcctgtttcccaggctggagtgcaatggtgtgatctcagctcactgcaacctctgccttccgggctcaagctattctcctgcctcagcttcctgagtagctgggattttaaatcagccaccatgcctggccaatttttgtatttttagtagagatggggtttcaccatgttggccagcttagtcttgaactcctgagctcaagtgatctacccatcccggcctcccaaagtgctgggattacaggcgtgagccattgtgtccggccctcttcatttaatttatttctctttttatcacttatcaccacctggcctgttttgtatttactcgctctttaaaaatctgccctcccatcttgaacataaactccctgagggcagggatttcgtctcttttgtttatttcctgtaatccacctctcggcatatagctactggacattcaaaaaccagcccccgtgtgtaggaaggatatggcaagtcatggccatcccagagctgtgtccctggagttctccctactccaggttgagccccaggaaattttgtgggtgtaaatgctgctgctaggtccatgcgcacccgctgtgttcagctggcgtgaccttcttccctcccacttcgccccctcccattgatgctttataaatgtattagtggctgcatgatgtcaccgtaatgcattttgggaatagccatgtggtttatacacacttgagttgctttgaatgcaaacctgacatcatactgaaggcagcagtgaacaacatatgcacagtaaacaggcagagactgtcttattgattaacagatgaggcctctattatcgatcaaagcttggcgaggaaatttatcacttttaatttcagggctgccaaatatttctgcctctgagccagccattacagagaccatttaaaggcacaagcctcctcaggagagaggattttgtctgtctcgctcggctccgctcacgtgtccatggaactgcctgtctttgctctcaccctggagagctgggggggaagtcagagcctgtccgggtgggcgtgggagtactggggcttcgtgagtgggggctagcaatgggagctgacgtttgtgttatccacgtgtaaggagggacctggcccagagtcactgaggacaggggctttcacatgctcagctcagtgtcgtgacttcagcgaggtgggggtggagtggcgggactttgaaggcaagcagatgtggtcaggcttgggccgaggcagccgcctttactgatcatgtgtgcttatctgtcttcatcttcctctgcacttgtctgatggtacacatccggccctttatttcctacctggcctccttcctttctctctgcttctcagtcattaaagcgagaagctcctctagcccacagtgatggctgttttctaagaaccctccgcgccacatcccttggaagcctgtggcatggtgggcttctcgccgattggagtgccctccccttcccagctggtgcttccctcctcgggcctttgcttcccctttctcctttagggagctgtgagagcggatagaacccaaggaagaaatacaattaaaatcagattccttacagatccacagaaaatcattgatggctgatgatttgggactgggggcagtttctaattgtgagggagctgtgacttcatccagccgcagctttcccatccaggcccactctgctcttggaggtgctttctgcatttccagtgtaaatggatgaaaggtagtcttggctgctacccctgtgaacacatgtcatgactgctttgctgtcactgggggctagaagttttcttggctctttcttcaaagctctcttaagccgtgtaccaggtgcttggcctgaggatgccctgtggcgtgaagggacacccagaggtcaccatgggattctccctgcctccaggtgaaattcaaccccagccacctaaggcaaatgacaatatttatttttaaagctcttcagtaaaagtgagttcatatcttccatggggtactttatcacccacttatccagccagtcgactcacatttattgagcacctactagagtatatcctgctcatcagtagaagataggtgtcagtgagatagagaaagtcgatacccccagaggaccccacattctagacctcctctagggtcctcatattcttcactgcaagaagcattcattggtattgaagtctgtgctggaacagcttgtatttggagttacattccttcagtatgtgctgattctccaaggcagaggttttcaaatttctagaaaagtagtggagtcatttttccaaccccaaagccctgatgtgtaaaataggtaaattgaattttcattcagagatgggagctcagaccccacccatggagtcttatccacaaaacatctttgcagatggaaccccagggaggccgaagggtacggggattactctgaaatcaggctctgaaatcaggctgcctgtgtttgaattcacctttactatgtcaaccactgtgtggcattgggcaaagtgcttaacctctctgagcttgaatttactcatctgctacctggaggtaatgctagcatgtactataaatggtggttgttgggacaaaccatacatactaagcatttagtgtcatgcctggcatatagtcaagcctcaggaaatctgaggtgatttgaaacagcactgtgggctacaaatttgtgtaacaagtagttctggctcgtacgaggctccaatacaaaactaaaacacaggcatatttaaagaagagctaagatgaccagacacagtggctcacacctggaatcccccagcactttgggagaccaaggtgggaggatcgcttgagcccaggagctcaagaccaacctgggaaacacagtgagacctcatctctttaaaataaataaataaataaaataaaataaaataaacaaaaaaacagaattagtcaggcatggtggcgtgcacctgttgtcccagctactcaggaggctgaggtgggaggatcgcttgaaactaggaggttgaggctgccattaagctatgactgcaccactgtactccagccttggtgacagacagagaccctatctcaaaaacaatgacaacaacaacaaagcgctaagacgtgttgaaaggaacagagtgcagtggcagattggaaaggacagaagagtaagggacttgagtgcttgatgtccacaaactgtggccttgaaaatgaagtgggattcgaacagatggaagaatgggactgagcattgctcaggcacagagactctgggaaggtaagtggtgcccagagagggccggtgaggacagcttacctatggaggtgggtggctaactgggacaggttatggaaggccttgaagccaagtagaggaatttagaatcagtacacattgggaggcgttgtatcttcttgagtaagaacgtgtgaggaatcaggtggctgtagaggaacctgcatctgttgagtagattgcgggtggctggtggtgtggaaaccaccttgcgtcttacagtgttctgagtgtgacgcagcaagggcctgaatggggtggtgattgcagtggaatcactgcacccaacgcagtggaagaatgcatctaccagacatcttgaaggaaaaatgccaagacttgtgacagctgacccctggatcagataatatagtagagccatgaagactattagccagtgataaaaagtactgtttcatcttgacatggtggcattatcactttaagccttctaaataacagttctgagaaagtttattaaattgagttgcactgaattaattttatttattccacaaatatgtatagtaataggtttccagtgtgtgtcaggcagatgcagctgtgcacaagacgacacagtccctcctccagggagcttacggtgtggtgagagagaaagacagggccataggcatttaaaatggagcacataaagggccgagagctggaacatatcaggtgctatgggagcataaaggagcattgcctcacctacagttgggggcccgggtattgaagttgatgtatgaatgacgaacaggagctccaactgcaccatagcagccagagaagcatgggagaatgtcagaggcagaggacatgcagaagaatatgcacaggcctagcaatgggaagaacacggttcctccaggcagcccgcgtggttcagtgtagctggagaaaagagagcaagagtgaggtgtgagagacgaagcaggaaagaggagcacacccagaaatgctttgtgagtcacagtaaggagtttggaccttgttctccaggcacaggggagccattcaggggttttaaatggtcagatgcaggtggcagttgggggacagacgatgagtttagttttggacacactgagtcagaggtccccatggacatccaggttgaggtatgtcagcaattcttacattcccataaagtacagtttaggcaacagggcacatttccctgtgttggtatcatttttctcctgtcccccccatcacctggagctaggtcttcagatcctccttcttcttgaggtatctaacttggaacccatttccgtttatcttggttgttctgattttgtttctccttctctctagaagagccctagacaagggcattcagaattcagttgggtgaatgctcacctcttggaggagggtctgagccatggatgatccctcactcaggatttttgcgggtgtccagtccccttccctagtgtctacctgcacagttgtggcccaggacctccccgctcaccagtggactattgctctagtggtaactgcctctcctttctttcagcgggtgccaaagcctttgtctgtgatcagtgcggtgcacagttttcgaaggaggatgccctggagacacacaggcagacccatactggtgagttgacttggattcctgttctccaggttttccacagtgttggtagcacatggacatgaactgtctgggtggcaacctctttttagcaaatgtgacatccagtaatttcctgggcgagctgtgagtaggatgggcttctgccacgttcagctactcttgtctgtgtggctggcccagcagaagtttacaagtatgacatggccccatgagaatggctgtcctagattaggccaagatctgtctctaaccagccactgagagctcatgttcttggaggtatctagtatgctcttgttgaggccttagtctgtgttgttatcaaaacatcttcttcccttggtcaggaaatctctcacacccatctgatgaaactgaaaccctcgtgtggccacagttggctggtcctccctctgcgagagctgagacattgtctaaaatcagcgtgtacgcaggatgcatttgaacaatattaactcacgatgatagagctttatttgatttcaaagggattgatttcaccgcaccaaagtcatctgatcattgtgatcagagtcgttgtcatcacatcatcacagcagctcacacttaacactcacagtgaggcaggcactgttctcagtgctttatgtcaggggtccccaaccctgggatcatggactggtgtctgtggtggtctgttaggaaccaggctgcatggcaagaggcaagcggtgggcaggcaagtgaaacttcatctgtatttactgctgttcctcattgctcgtattaccacctgagctcctcctcatgtcagagcagcagcagcagcagcagcattagattctcataggagcacaaatcctattgtgaactgtgcatgcaagggatcaaggttgcatgctccttatgagaatctaatgcctgatgatctgtcactgtctcttgtcaaccccagatgggaccatctagttgcaggaaaacaagctcagggctcccactaattctacattatgtgagttgtataattagttcattatatattataatgtaataatagaaataaagtacacaataaatgtaatgtgcttaaatcatcccaggaccaccctcctgtactccgctgtatgtgaaaaggttgtcttccataaaactggtccctggtgcctaaaaggttggggaccactgctttacgtgatcccatctggccaatctctcagtaaccctgtaaggtaaggttggaagctactcttatgtcatagatgaggaaactgaggctgaaaggagggaaagtgacttgctggagttggtagtggggacaggcgtggtagagtcttatagttcagagctgagactgcatgggtttaatcctgactctgccacttcctatttgtggggccatggataaattatttaaactctcttaatttagatttctcatctgttagaaaagtggagtaatattagtgtctacctcatagcattagggttgttgtggggatgaaataaggtattttatttgaagtatttcatggagtgtttggctcatagtaagcactcaataaatagtagtaggtatatttaatgtaatagatatttattgagtttctacaaggtgctggcactgtttaggcatttaagatgtagtaatgcatgagacagacgacattgctgcctctcatggaactgagcttctagctgggagacagaatcagcaaataaatatacgatatcatgtctgcttatacatattaagtgctactggaaaaggataaggagtagagaataatagggagaaaagaaatattgtggatatttagggagaaatgttgtggataaaatggttagggaaggcctctccaagaaggtggtatctgggcagagtcttaaaaagtgaaggagtgagccactcaaaaatttctgggaagaatgtctaagcaaagggagtgagcatttgcagaagccctgaggctggatcaagcctgacaagtttaaggacccacacgcagagcagtggtggccagagagctgggagtgacgtgtagagagtggtgagggatgaggacaggatctgtcaagtctctcagccctggtaaaagatttgggttttactctgcatgtgctgagtcctttggagggtgacaaaatatttgcaaatcatatatttgatgaggaacttatagctagaaatagaaagaggtcttataattcaaaaaacataaacaaataatcaaattaaataatgggcaaaggttctgaacagacatgtctccaaagatagacaaatagccaatgagcacatgaaaaagatgctcaactgcattcaccatcagagagatgcaaatcaaaaccacagtgagatactgcttcacacccactacaatgtggctacaataaaaaatacagatagttacaagtgttatcaaagatgtggaaaaaccagaactctcatgggagtgtaaaatggtgtagccactttggaaaacattctggcaattcctcaagaggttagctgaggcaggcagatcatgaggtcaggagatcgagaccatcctggccaacatggtgaaaccccgtctctactaaaaaaatagaaaaattagctgggcgtggtggcatgtgcttgtaatctcagctacttgggaggctgaggcaggagaatcacttgaaccagggagtcggaagttgcagtgagctgagattgagccactgcactccagcctggcgtcagagtgagaccccgtctcaaaaaaaaaaaaaaaaggttaaacacagaattatcatacgatgcagcagttcttcttttaggtatacagccaagagaagtgagaatatatgttcacacaagaacctgtacgtgaatgtttatagcagcattattcataatagccaaaaaatggaaacaacccaatgtctatcaactggtgaatggataaacaaagtgtggtatattcataccatggtatactatttggccttaaaaaggaatgaagtactgatacatactacaacacagatgaacttgaacatgctccatgaaagaagccagatgcaaaatgattctgttcatgtaaaatatctagaataggcaaatctatagagacagaaagtaaattagtaggtgccaggggctggggaagttgcgaggaaattgagagcgactgccgatggagctggagtttcttcatggagtgatgaaaatgttctaaaattgattgtggtgatgactgcacagcttcgaatactgaggctcctcgacttacaatgggactgtgtcctgataaacccatcataagtagaaaagataataaactgaaaatgcatttaatccaactaacctactgaacatcatagcttagcctagcctaccttaaatgtgctcagaacacttacattagccaacagttgggtaaaatcatctaatataaaacctattttataataaaattgttgaagatctcatggaatttattatatcctgtacatgacttcaaaactgtgatggtttcccacaattataaacttgaaaaatcctaagtcggggaccattctgtgtattagttgaactgtacactttaaaagacatgaattttatattaaatggtatgtgtattaggtctctgaaaagcggcatgggtgtgtacatgtatataaatgagctctgccagtgtcaggaagagtcactggcatcactcatgccacctctctctcatacacacacacacacacacacacacacacatatatatacacacatgtgtatacatacacacacaaacagagtgacgtgccatgtattaagccgttcttgcattgctgtaaagaaatgcatgagactgggtaatttacaaagaggtttaattggctcacagttctgcaggctttccaggaagcatgatgctggcatctgctcaggctctggggaggcctcaggaagcttacaatcatggtggaaggcaaagggggtgcaggcatgtcacgtggccagagcaggagctagagagagagagttgggtgagggagaagcagctgcacacttttaaatgaccagttatctaagagaactcactcattgtcatgagaatagcaccaagaggttggtgctaaaccattcaggagaaatccacccccatgatccaatcacctcccaccaggcctcacctccagcattggggattacagttcaacatgagatttggacaggacaaatatccaaactatattacaccatataataataacattttggtcaacaatggattgcatatatgacagtggtctcataagattataataccgtatttttactgtgccttttctacatttagatgtgtttagatatgtaaatacttaccactgtgttataattgcctgcagtgtttagtacagtagcatgctgtaaaggtttgaagtctaggaacaattggctgtcccatatagcctaggtgtgtagaaggccgtaccatctaggcttatgtaagtgtgctctaggatgtagcctagaagctacccactaggaagtggagagctggaacttgacccaactcacgtgctctttccacgactccccagctgcctgcacattgactgagtgttgtccgtgggctaaaaggctcaggatcatttagctcactgccttgtcatgggcagggctcttttggctcgctgtgccctatttaagacaaaattgtctaatgaaacatttctcagaacatatccttatcactaagtgacatttgactatacacacatgcatgcacgcacatatacacacacacgcatacgtagctttactgagatataatacatatacacacacagatgtgcatttatagggaagggggaaaagtagtccattggagggttttgactgggagaatgacatgacttgatttatgtgtttaaaagattattctggctcttgtgttgcggactgaccatagagagtgttgtcatgtaacaaaccactccaatagtagcttaaaacaataaagtgttattgtctctgacagttctttggataactgggctcagctgggtggttttcacttggggtctcatgtggtttccatcaggtaatggctggagctggtgtcatctgaagactcgactgggctggatgtccaagatggctccttcactcaattatctgagtctcagtgttcctttgcatggcttctctcttcagcagagtaacctggacttgctgtgtgacagctcaggtttccaggagtcaggacacaggaactgccagccctcttaaaagctaggctggaagtacacagcattacttctaccatatttcatcaatcagatagtcacaggtcagccccagatagaaggcggtggaaggctggactctccttctcagtagggaagtgacagaaacctatagggaaggaggaattgatggcagtcatctttggaaacaagctaccacaggggactaaagtggaagaaggaagaacaccagtcagctgctgttaagattattgtcatcagtatttcagcgttcttgtccttgccttttctgagtggaaaacatgcctcctgactggcatcttgagctttggtctggaggggccttgccctgtcatgatgggaggggagctttacaggtgagctgtcattccagtcagcatctccctagctcagttatagagaaagtgacctggctaggttattttgcccagggttccagaggtggttgtcatgaaagcaaggggagaaccgggtctcccagggtcccagccattttcttattgctagaccgcatgtaactgagaatcccactctgagagttctaatctgggggaatgagctgtgagccagctttgccaagcagcttaattctgtccatccagattaaatttgcagcagcagggagccagctgccctctcagccaggggcaggggagtaagctgagtccccgagggatgagcagctgtggaggctgttcctaggcggaccccagacatatggagcaccccctgtgtgcctggcacctgctggggatatgatggtgaccaactcaggcacatgccctgttcttgaaataagctgaaggtctgaatgtggtggtctgggccttttgttttttccccagagatcttgtggatggggctcctcagctggaggagggagaggtcagctaccgagtgccccctgctgatgttgaggtaaaatgtggcttgctcaataggccacatgtggtgtgctcaataaagattgagtaaactgagctcttgaaaggatggggaatggagaaaatgaatccaaattaggggtgagagaccaaggtggatgctttgagaagggctccctgccagccttagtgtgagctgtgggcgagctcccccagcagggaagagccacttccttgtgtggggcaggtgtcgtgctcagtgccgaggggagatacaacagcagttttaccctcaggatagggctggcaaagaggggtcctgtgtgaccatggtgactctttccgacatgtggcagagctcattcatcactcacagcgctacttcctgctgaactcaggtggatttttagttcccctaataatcaatgagagaatacagtctgaaatctatttgccctctctgttccaggaaaggggtcccaggaggaagggagttgcctgatgacagggagcgctgaaaatgtcactaaagctattggagtgggaaaagccaggtgggagaccaggtaccgttgggaagccaacgggagagtaggtagggaagagctctgaaaaagagaaggaatggagaccctgggacagtaaaaatactgccagtgccacttgatatttttgctaccttagtttataaaacaatttccttgattacacccatttaacagatgagaccatggaggcctagacactacccactaggaagtagagaactggaacttgacccaactccaactcaagtgttctttctactactccctggctgcctccgcactgactgagtgttgtccagtagtctgtaggctgattggttccgggtgatcctgtttagaggtcattgagttcatggccctgcctgggaagagctcttttggaaccctgtgctccattgcactaagaagccgcaacaccctgatgtgtacatcctcctcctggagtaggatacagtttgcctgaatcagatcagtttcatatccaaggctgccatgtgggagttcatggagctcacgtgtggctttgcatagggcaggtggttatggtgttgtacaggtattcttgaaactggaaaatgaatttaatggaaactatttccaattccagcctatccaagagaatggcatgttcacatctcacccttttgaccctatttgacctggatttctgtcctggtgtgtgtgacccctccttgccccctgccctcaagatcttgacgggctcaagctggtgttctaggaggccacgcttatggttgggctgggctcaggctttgttgtcacattcagttttctgttttggtacaacgaaggctttgaggagataaacagagatcattttacaccttttatattatgacaaatacatattgcaaaacactgctgcttccaaaatgtttgggttgcagagcagtgaggaattaacagctaggcagttcccgagatgcttgtacttcatttacacatcagaattttttttacactgttcagtaaaataaaagtgagaaaacacacatacgtgcacgtgcacacccccatgcacacccagtgcaccacctggcttctatatcaggaatgtcttaaattagtaagtagttctttaagtccagataaactgataaataccattaatggcttaatttattctctgggtttgaaatttgacacacggacactatcttggctcaggaaacacaagtggttttgtgccagaggttttaatgaccgatcagtaatataaattgctgcatcactgagcagaaatagcttctccatgtcatttgatctggaaacttctctggccaggcagcagttaataaatttaaaaataattaccctctttattcaaagtcaaactaattaggagtgggttttacaaatcataatgttgttcaagccactgtacatccccatttgggacttgaacaggcctgggggcaacagacaggatccggtggtgttaattagagggcagcgagataacttggctgctgagctccagggtaggaggccgggcagtcttcagcatgccctcgggagaaaatgggaggtctgagcaaagaggccatgagggtgacctgtaggaaccttcaactctttcagtccatctgtaggggacccagagcagccacctattggtaatgtgaacatgggggagttggggccagggctggtctgtgtgggcctggccagagagactgagggagtcagggagcaggaaagggggatgggcaaatgactgcctggggacaagagacctgcctgaaggcagggaagtggatgggatgatctctagaggacattacttcctaggaaagtttgagccctaacagagtggtgcaggtttgtcatgcagattgcagggaagaggaaccccatgaagcctaaagtcagagtgtcaagtgcagggtatttggtgcacagtgacccagaacttgggatctggtgtcagactatctagattccaattccagccccatcacagattggataatctcaatataggcctcgcatggagtaagtgctcaggaaatggaggtgccagtttctctcatcgcatcatcctggtcttcctcagaggcttctgagaacatggatttcccccactggataggttgacggggccaagtcagtgaggatggtgttggaggaataggaacagtatacacctgctttgcaaggccatggtgaggtcttccaggatccctgactatgtcctccggccaagaggacatttgcaatgtgcccactgagttaacagccactggggccctctcagtgcagttgaaagaagtgagggcagattgaagctccacactttgagcaatctcagggagcagatttggtagatcttaaggccctgaggtctggaatgcccaaagcttcccaaaggaaccattccctgttggtgtctaaacaggtgatgtgtaaacccaggccagacaggccgcaaaactggaatcgagactaagcaggtgtaccagcctccaggagcaccaggcctgtgcccttccacgtcttaagaggaggcttcagtgactggtgccctcaaaggctcaggaattttgggttcctggtagggtcctgaaccatgtctgctatcaccaggaacctgggtattccctatctcttgacttcttcaaatagaaccttccacctcatcctaccttttcgccagtaagaaaaaagaggcaaggtcattcctaggtttagaagttctgaggctgggaagcttaagggcaccctctgcaggcccagggtactaggttgaactagaccctagacttaccctggaggaattcagctctctcctccagccctcaacctgccctgcaaggtctgccaggttagtgactcaagtttgctgtgagagtagcctgtgtagctggcttatcctgtagttccttcatttcctcattctctgagtttttaagtacctactgtatgctaggtgctttgtggacttaatacataatagtgaacagaaattgggccctgccttcctgaaggttacggtgttatgaaggaaatgagcatgtaggttgaacttgccttaggtacagataattcaatagctgtactcttttggatacttttgagttattatttttattaagtcttcactatagtccaaaaatatagaccttttttcctccctaatctttgccagagaaaactgagtcccagaaaggttaaggaagaccaatctggggcaggacttgaatgtgtgccttgggcttctgtaccccagagcccacattttagcattgtcttccctccctgtgggggcctgggcatcagctctcatgtgcggatcaatggatcaaagcccctatttgaaaaagggggtcagttaagaacacacaatccaaactagaattagggcccacgagttcagcccaaggttctctccactgtgactacaaaataagtactttcttttactggcctagaaaaggttgcttagtttccacattactgcgtcacaggggaagccactcaaccagatgcaaatgttgagatgctggttctcatccactgtgttgtcggctgcaagagtcttgcagtccagaaacggcatacctctggcggctgagggtccatgctgtggactctgcccttcccttctagcagggagtgggcattggagggaaccccacccaaagggtcctcttcgtttcagtgtgaaggagtctaggaggcatatactctgtcttccccccactctctgtttctctctctttgtctctctctctctctttgcactgtgtggcctccccctttggaggtgcagaactgtctctccaaccttggtgttggctgcctgcttgcactggcccctctctcctgatatgttaataatatttggaggaagcttcagggacagtccctggctctgaacttcagagtagaaaatgaagtccttgtttggagaattttctgtagtgggtgatcatggtgggggcagggggtggggtgggagtagcaggcaagacagaggatttattttattttaattattatttttgagacagagtctcgctctgtcgcccaggctggagtgcagaaggcagaggatttaaaagggtgagcagcaacgctccttccctcaggatagctgctggccttgccccctcctgccctgagcttggcacgagggacagtgctgggcaccaaggagtcctgtaatgataggaaaactggcaactgttctagttcctgctctcaagaacagcctcccagtggctggtcccagaggagctgggagggggccagatgatgacaaataacttaatctacctaaactttacatgaaaaaaaaaaaaaatccaaacgaacctcaaacctctgtccaaggtggagggtatcggggaggacaggacagtgagtcatcagagggacaggcagactccatgtggtttgctgtgacctccccattgaaaacataatagcatttgacttttataaatatcagaggtgatttgtatagcatttcacattctgtgccaaggaatttaacatgagaaagctcaggctgaagaacggccgcggaacgtcataggcactttgggaggagggtcatgtgctgctgtttgtacagtcagtgccccagcatagatttactcttgacctaatttcatgctgttactataaaggcatgtttgatgcctaatatagagttttattttccaagcacagggctctcggctgtgctggagctgcttgctgtagagtagggaggaacaacccagccgtctcctgctggcccagaccagctattctttctctccattgttcaccctagtggctcccagggcccctctggccaccttctggaggggcccccgatactcttttttaaattaataaatttcatttttttaagagcagctttaggttatagcaaaatggaatggagagtatagagttcccactgtacccccgtcctcacacgcaagtgcacagcctcccccaccatcaacatcccacgccacatgggtggtacatttgttacaattggtgagtctacgctggcacatcattgtcacccagggcccacagttcacatgagggttcactcctggtggtgtacagtctgtggatttggacagacatgtaaggacacgcattcaccatttttgtatcatacagaatagccgcttcactgccctgaaagtcctttgtgctctgccctttcatcaccccagcacattttatatgaagcatcactgccctggacagtgatttgaggggatcagtggtgtttggctcttttgggattggagaaggagaatttaagcaaggcaggtttggattagaaagggctgaagctcatttcctccacagacatcttgagtgtttctcgatgccagacatggatgctgggtcctgggatagggattttggacatgtatgctgggacctgggaccgggatgccagacacggatgctgggccccgggacggggatgccggacatggatgccgggccccgggacggggatgacggacatggatgccgctgggcccagggacggggatgccggacatggatgccgctgggcccagggacggggatgccggacatggatgccgctgggccccgggatggggatgccggacatggatgccgctgggccccgggacggggctgctggacatggatgccgctgggccccgggacggggatgctggacatggatgctgggccccgggatggggatgccggccatggatgccgctgggcagtgggcaggacacagaccttgcccttccccggcctcccaccctagtggaaatgtgattgcagattaccattggggatgtggaggcagcatggtgtttggaagcaataatgaattaggagaaggagaactaggttcttatcctggctctgctatggacttgcttcatatgggacaaatggcttcgtttccttgcttctctcaaaggtagtgtgtaggaattgggcaagaaaagtactgtttggggggttctgtggttccaaggacagcctaagattctgatcttgcattgatggtctgtatttttctcaaccttagtttttcacatttgtaaactacgattaataatcataatggttgctgtaagaactacataaaaccatacatgtggggccgggcacggtggctcacacctgtaatcccagcactttgggaggccgaggtgggcggatcatgaggtcaggagatcaagaccatcctggctaacatggtgaaaccctgtctctactaaaaatacaaaaaattagccgggcttggtggcgggcacctgtagtcccagctacttgggaggctgaggcaggagaatggtgtgaacccgggaggcggagcttgcagtgagaagagatcacgccactgcactccagcctgggggacagagcgagactccgtctcaaaaaaaaaaaaagaaaaaaagaaaaaaaaaatcatacatgtgaagccctgagccctgggaaggaggactgatgtatgcataagtggtagctgcttgctactgttatttttagaggcctgcagtttctgtccctcaccagtagacaagaattcctccactttatttagtagcttattcagtaacagtgtattaaatacctactgtgtctgaagaagggattaaagatgaagatcttttgcctcttaaaaactgttctagaaattggaggggaaggatagagtctgatctttgaggactattattcagaacgtggtctgtgcccagcactgtggctttttatgtatggtccaatatagtcatcaggacaccactaaggggggcttcactgtctgcatcactgatgaggaatcacaggcccagagaggcttaaataatacgactcatccagtggcaggactgggattccaggttggtgttttcttggggtgatctggcaggactcaccgtcctcactggtctgagttgccccttcactctcagaattgtccccacatccgagtcctgaataatcaacctcagttcttgatctcaggtttccactcgtctcccctcgtgcccatgctcagcccctcaagcttctcctttatccctctctctcccactgtccactcctgtgtttcctctctgacttctcacccttctccttagtgacgccatggctgcctgatgacagaaaggagttaataaaaaccaatgtgtaactgaaacttgaaaggccataaattgccttgttttttctaggatgttggtagcattttgatttaatagttggacaaacacaagggcctattttattcagagtttacaggcctcaaggctgttattcctccaaagttaatagcattgaaattgcagggtttgctataatttgcctatcgctttctgctccaccattgatgtttactgtcagcgggatggaatctcaatccgactcacttagataacatgtctgttaaacatttagataattgtaccatcattaacttgtcacattattttagagattcaaaacagaggcagggtaagtagaggtacccaaagggagtggaggtgggaggagggggaggaggaggaggaggaagagacaacctcttctgagttagacagccaggagaggagaaagttcattgcacaccttggcatctcattggaggtgtctaagttaaggaggtacgtgccaccaagccgggcccagggttgctccctgaggaatccggggaccagtgtctcaaccaccgaccgccgtggcagtagggcctgttatcagcaggcccctgagacagtgtggcaaatgctcagaaacccttggcgtttcatccccgactttggcctttatgtaccaaagtttctaagctttccttagggatgctgattgcaacactatttgtaattgcaaagcaatgagaatgacctaaatatccaaaagtaaggaatctgtcaatgatggtatggaaagatgtccatgatgttttgcatgataaaagctgattagagaaatcaggttatatagtgtggtcccatttcatataaaatactaaagccaccctataagactctgtaatgctctatacctgttaacaatgattatctttagaagtgggattatagggcaaaggtgttctactttctgctttatctatttttgagtaataataatgatgatttacaagcacatatcacttacataattttaaaaattaaagtcactttataaataagaaaaatatcaccttcaagtctcattctgtgtatggaaggaggacttctaaaaagaaaaggctgcaagtacaaataaatgagttttgggagcgctcatggacatcagtatctcagccacactggcaggtgcctcagtttcccactgttagaacagataaatgccagatggagaatgcagcacaggggaatgggcctgtgccagcactcagaggtcagggctgctgtcttgttcactatgggcctgacggaggaagtgagtaagaagagagctttttcttacaccgacataaggactgaggtcacacctggagggggtgacagaggccacaaataagaatgagctcagctggaagtgggagtgactccccatatgggagacttggggatcaattaaatatcaacagtagtggggcactgagcttggaatacaaaactgccctcgagaaataacggggtgtttgctccctgttcccatggtaccacgaggtcacagaggtgactacagtgctgtccatctggctttggacactgttatctcctgcattcccagggccttctgtgtgacctgggcgagagaactgtcactattgcctctctccaatctgtgtgtgccccagtgacacaggcaataggaaaaatgtttccccaactgtaccgtaaataatgcagatatttgggcgtgggagaaacaaataatatcaatattttatagactgtaggctaaataatgtatatatttagaaaagcggcttaaatatttcatatgctgcagtgaagattcctgcttagaggcataatttgggctggtgagggctgtgggttaaggatgcagtcctgcggagccccggggtgagggggcagaggggaatgcagtaaaagtgtgtgtgtgagattggagtgtggcaaggacaggcaggtatcacttatttggaacccaagtagttggaagtctcagattttttttaactgtcctgtgctctttttgtttttaatgtgggagagagacaaatgacaacctaataacaagaatttattttcaaaaagtaacttccaacccaagagaattgaaaatgtgtccacataaaaacttactcatgaacattcatagcagtgttgttcacaatagccaaaaggtggaaactacccaattgcctatcagctgatgcatggatatacaaaatgtggtatatccataccatggactataatttggccataaaaagagtaaaatattgatgcatgttacagcatggatgaactttggaaatcccgtgctaagtgaaacaagcaagacatgaaaggccatgaattagatgattccatttatgtgaaaatgttcagaacagagagctctagacagttagtagattagtggatgccacaggcttggggaaaatgagaagtgactactaatgggtatgtggttcctttttggagtgatgaagatattctggaattagatagtggtggtgatggtattcagctttatgaatacattaaaaaccaataaaagggccgggcacagtggctcatgctttgggaggttgaggcagaaggatcacttgagcccaggagcttgaggctgcagtgagctttgatggcaccactgtactccaggctgggtaacagagcaagaccctgcctgttaaaaacaacccccccgcccccctgcaaaaacaacaacaacaaaaacattaaaagggtggaattttatggtacatgaattatatttcaattaaaataaaaaacaacttccaggtatgttgttggttcttacagacttaacccaacctcctatacctgcggcatcacaggactgcaggtaacgctttgcatcatagtgaccattcagacagtgcaggagactgtggcacctttagaatcattctattcacagaaggcagcagggagtaggggtggctctgggatgcctccttgccctccccattcctccattttcagaaacaggaaggaaggatcaggtctgaactctgatctggtgaagtagtgagtccgacatctgcaaagtcaggaggagacggggtagttgcgtctgtgtagatttctagaagaaaagccagccatcatctggcctgggaggagtcactcttgtcaaaagcaagacacggatggtattgacccaggcaccccattttaagaaaaatcatacctgtaatacggcttcagtgtggggaaattagaaaatacttacaaacaaaagaaatatgttctctgtgtcccactatctttttttttttttttctgagacacagtcttgctttgttttctaggctggagtgccatggcacgatctcggctcactgccacctctaccttccgggttcaagcgattctcctgcctcagccttcacaggcatgcaccaccatgcccggctaatttttgtattttttagtagagatggggtttcaccatgttggccaggctggcctcaaactcctgacctcaggtgatccacccacctcaccctcttaaagtgctgggattacaggtgtgagccaccacacccggtctcatttttcttttattcacaaatggggctatgatattcagtgcatactgttttgtaatctgtgatttgcctaccaacagacctatgtcttgatgatcattttaatggtttcccagtgttctccctacacccattcgtttttttctccccatgatctctgatgttccttacttgtgcaccagggaccagaccctgtatccagaggaccttccaggggctccaggcaggagaagtggctaacagagatgcagctcattaccacctctcacctattgctgcttctgtcaacaagataaactgggcccgccaagcagttttgcagtagctgtttactcgaccatcccaggcaagcttgagatgctgggaacatatccagtccccacattcagtcttcttagaaactgtttcccttttggttttctctaggcttgcaagtggtcactcgccctgagctggatttgggcaggtaatttacttccgctactaatttaacgaatggcactgccctgaggtcgggcagactgaggaaaatataggcatcaattcatttgccacgttaaaacccagagttaagtaacaagttaagcatctccatacattaagtatcccaggcccaactagggaagatttcctggagctgatgagccccaaccaggcattaggaaaaaggcatttgaaaaaaaaatttcggccgggcgcggtggcttatgcctgtaatcccagcactttgggaggccgaggtgggcggatcacgaggtcaggagatcgagaccatcctggctaacgtggtgaaaccccgtctctactaaaaatacaaaaaaattagccgggcgtagtggtgggcgcctgtagtcccagctactcaggaggctgaggcaggagaatgacgtgaacccgggaggtggagcttgcagtgagccgagatcgcgccactgcactccagcctgggtgacagagtgagactccgtctcaaaaaaaaaaaaaaaaaatttcttctctgaaccttaggagaagttagctaacagagagattgtaggtttgggtcagacgcaatgttccctgcccccagtaggagaagatccattacagattggaaatgactttgtctcttaagtgtgcattgtcagatgggacgcacgttcccctcaaccaaacaaatataaaatgcttccagcctctgcctcggattttctattactgtttcacaggactccagagagttttaagatagcaatttgattaagcttatggggaagatcccatcagataacattctttttctgcaggtagagataatgtgttcaagtattaagtatgttttaaaggtaattatcttttccatattcattttagttacaggaattgacaagggggagactctgcatctgaaagctgccccttgggccctagagtcactctgactgctctcctctggggaacacacttgaggcttttgacaaatgaatgagcaccaagggtttttctattttgaaatggctcgggatcccctgtctccagacaagtggtctagagggcaaggtcttggccactgacctcatctggctccctagcttagattccttgttctgggacacccactgggccccaaatcttaagctcctggatgtcaagagggagcctggctgctactcagaaagaggacttgtctcatctagtaccaagtcatggtgccatatcgccaacctttcaaaagtagagtctggaattgccatttacatatactgagcccagtgttggggtgttttcacatcgggagacactaattaggggtcctagaattctaaaatctgtagactcctagactgcagaactgttgcaaggggctttagggagcatgatgctgagcttcagaggggttctgggatttgtctgggatcacacagcaggctagagagacacactgtgggctagaacccaggaatccctggtcttagaccactgcttctgtccctctacccacaactctgtgccatctccagaaaagctcctctttccctttcctggaaatccccagagtaggagattctgcccccaggcagccctccttggccgtctgtgagtcagggtctgcaccagggctctgtatgggcctgaggagcccccatagcaagcctgatgctgatggcctggagttcctcaaacctcactttgcctgctagctgtgctgttctaagcattctgtacatttttacaaaatagaaaaattagggctcagcccgctttcagaaagctaactattgctagggaggaaaacatacatatctaaaaagataagtaataaaacaaggcaattggatgtgatatacctgcactaagaattgaggagtgatgtttttaggttccccatccctttgtctgcccaaaatccagtctgctgtggctagacacctatggcttctgcacacagcatttcccccatgttacttctctgtctgatctctcaggtgcccttggtttgacagctgcagcttgttggtctgaaggcaagtgacactgggaaaggaccctagtgagaggtttatcacataagaccccaggatggcggcatgctctgtttttgaacgactgcctcattcctgtaagacaaaggtggcaatggagggtggatgcagagttgatggctgcagcccaggttttggtgcttggcctcatgtgttacatcctaggtaaggatgtctctgccatcttaacacccatacctgctcttgcgtctctctctcttatccttcaaagcatcatcattgtcttaccccagctatacagtgaaatcatttagaggaactttatgaaaaaaatgtattaatagcaagcaaaggttcccacctcaacccggatgagtcagaacctcctgcatggggctcagacatggatgtattttcaagctccccaggagattcctatggataaccagggttttgaatttccagatgggataagattagactctgctgcatggcccagaaggttcctcacaatcagagtcacaggcctcatcttttgtcaccccctatgatgcgtgtacactgagccacttagaatttcccagactctcctggctgtttttctcctccatgcatcttccactaacccccacactctcatgtgtcttgtttgcctgatacacacacacaagacacacacacacacacacacacacacacacacacatattgaggcagagtttcactttgtcacccaggctgtagtgcagtggcaagatctcagctcactgcaacctccgcctcctgggttcaagcgattctcctgcctcggcctcctgagtagctgggattacaggcatgcgacaccacacccagataatttttgtatttttagtagagacagggtttcactatgttgaccaggctggtctcgaactcctgacctcaagtgatcctcctgccttggcctcccaaagtgctgggattacaggcgtgtgccaccatgcccagctaatttttgtatttttattagagatggagtttcactctgttggcccggcttgtcccgaactcctgacctcaggtgatccgcccacttcggcctcccaaagtgttgggattacgggtgtgaaccaccacgcctggccttgcctgcctggtattaatagagtcttctcagctcatttgtcttctctatgacacccttttcacagttgaccctccttctggtctccagcaccatagatgtacaccacttgcccttagctatcttgccactgcacgagttagggtgaagattgaaccaccttggggacttgggcctttctactgtgttagttcaaataatcattcaataaatgcttattgcatgattaatcaaaaacagaaaagggagcttcctgattagaagcaggaatgaagaatctgttcttgtctggcttcagatttttgctcttcacttgccaggtgaaggaccttggaagagtcactcatcctttgcaagtctcagattccttgtctgaaaaattaggacaccatacctgccctttatacctcaaaaagggatgtgaggaccaaaatggtgttagaacagggtagggtctttgcaagcagtaaagcatgattcagatgtaaggtgatgtcattgtgatgtttcctcttgctgtggtttcctgtcatgggctctggcttcagggtgccctgcaatgccaatgcaccccagtctgtgccctctgcacagcctcccatcccagcttttctgggcccttttcttccgttggcttcttttatcttgcacctaccttgctttctccctgcacgtaccaccaccacaaatgctgtacaagagcaagttaaccactattgttttgaatgatagagaaaataatgagggaaacagactggtccattcagtgattaagtattcagtaattaagtattcagtgttaggtggtgggcagaagttaggaagaaaggtatcttaaggtttttgattcggcgtcatccgaatgggtcaatgagacagattccacaggcaaaccattccagatccataacctctagagtagaaagtttcagaaggaagagatcccccaaactgtgtaattcccttgtaaatctcattcattcaatgggatttgagaaccaaccacttgtgcaggtgcccgcatccgaagataacttgcccccaggagacagcagataagaagagggcagagacaaaggaggtctttttgtgacttgcatcatggatgcagaaaaggtggataacccaactctggtggggtgagtgggcagggaaggtttggaagcaggaggaggagacactcaaagctgctttggggtgcacttattttgtgtgctggagaaggatttgctggccatttcttgtgaaataaacttttttgtgtatgcatgtgtatgtaggctgttactaatcccgttcctttcttgatctactgtttttcaggttaatggtgtctgggatttgtggagggaggaaggatataaaagggcaaaaacaggagaccccggtgcctggattcagagccttcacattccggagatccccagaggcccctctccccagacccttcagctccagaaagccattgtgctccctcctggcctctgaccctgaggctctgggaagcagcaggttgttgacacttggacaatcatttcttgcaaggcaactgcctccctggggggctctcctctgccttagggtggtgactattcccccaaccagggttaaggaagagaaaaattaactgttggtcagagcaggaggcaaggatagagaatcctcaatttcaggcccccaggcatgttcacccctctctcacttgccacttcaggagtacaccacagcccagggataagctttaggaaaatgggttcgagagaggcatttctgatcagagttccttctggcatcctgctgtgggtctcatgtttgttgaggggaccccatatttcttcatgaaggatatctgtatgtctgctacagtctcaggaatgcagccacaggaacaaagaaatttctagccctggtgctgctacttattaggagcaagacttcagacaagttgcttttcctttcagaagcttggtttcctcattggtagaagagggtcaaaaagtcacttgcccggtgagcctgctgagaagagcagatgaaggaggtgtactctgcactctgtgaaacattgcaaatgtgcgggttgatcattaatgttttctcttacagccaaagctagtgtgtgtgtgtgtgtgtgtgtgtgtgtgtgtgcgcgcgcgcgcgtgcacagtttgtgagtgtcgggttcccaagcatttactctcctctctcctttctaggacatttcaggaagcattattcaaaagccggtggggtgggacagagggactattaaaatttttaagaatcaccttgcatttctttcactttggtcttaataataaataactctaaccctgcagccaggagctgggatgttctgtccaaattagcacaaatctctgtctgcaacagccgagcatccccgttcagtgggcgggatcagtaccatttccccagcaatgagaaaaagccctcttgctaagctacagaaaaatctcccttgtgctttaattttggaagaagcggattagtgtggccatatttaacctttgaccctgaaacaaaagcattatcaaaattatttaccaagagcgtctgtcttcttctcctcacccccacttccctgtttgccggggctagtttagaatcttggtaaacttcttcagagcaagagcaaaattttggaaggccatcattaccttagagacatcccaggcctggtgttcactgccagggctcttggggtctaaggtgggttaaaggacagagatgagaatcttataccacagtggggttcaaaatttgtgagttggatgtaaaaactctttctcctctgaaactagcctagtttctggctgtcttggagatttaactattcagatgatatgttgattttttttttgttttgttttaaagatggagtctcactctgtcgccaggctggagtgcagtgtcttgatctcggctcactgcaacctccgcctcctgggttcaagcgattctcctgcctcagcctcccgagtagctgggattattacaggtgtgcaccaccacccctagctaatttttctatttttagtagagacagtggtttcaccattttggccaggctggtctcaaactcctgacctcagttcatccaccctccttggcctcccagagtgctgggattacaggcatgagccaagtgagtgacctaaaggtgcagattgatttctaccttcttctccttccaggcagaaatccatagacttggtggtgtggggtggaggtatatctagacctgagccatttctgtgggtttaaatctcatcttccctgtcattaactgtcactgtggccttggacaaattatttgaactctgagccccccacctaccttccttatctgtaaaatgggcatagcaataatagtgcccgcctcctagagttatttttgaggatagataacaggatacacatgaagtgcttactgtggggtttggtgcttactaagtgttgagccagtactaactactgttaccacagttgttaccattgtcatcagtatcatccttattgattcttcgtcacttccccaggtcctggttggctcccttccccctcccccgcattggggtgttattggcgacccgccccatttcctgcttgtcctctgccctcaccttctttgcagtgattttcagagtccccgtttgcgttcgcagtggggagtttgacttcatttcataccaggaaggccagcttgcagtgggggattgggagggcagagcgctttataagctcgcgatgaaagctgtaaaacgagatggtcaaggatctggccaggcctggttcgggattatggccggcccctggaatgctgaggggggcctcttttaagaagccagtgtctatttacagtgtatctctcataaaccccaacgctggggcgagggcagggggactcgccctcctggcatgtgattgattatctggtatttatgccattgaggacttgtcagcggtctggggtcaaagggtcatctcatgtgtcttgccgccagcccacctccttttgtacagtgtggaccgggcgagctgtgcacaaaacagctttttcttttccttgggaaaggggggatggggaggggggagtgtcaatgaaatttttttttcagccttttctgaatagtgttctttaaattctaaagaacttttaattaaaagtagcaggaaaattcatcttgagaaggtttaacttaccttaacagatacttttgtgtcccaagaagctgggagtgactttgaaagaaagaaagaaagaaagtaaggggctttgttgtgcctctccccctcccccaggcattttcaaagtttcctggagttcttgtccactcctgtctggtgtggaccctgcttgggaaagcaggaagggaagaggtcattcttctcctttaacatagccacacaaatttagaaagggacttggggattctctgctccaattttctcctgttatagatgaagaaactgagccttgacaggtgaaaagacttcgctatagagtcacacagctacacagttgcggagtcaggcactgggctctgattctctgtatttcctagtgctcctttgagcatgccaggttgcttcccgaagctgctttggatgccaagtgaagataaatgtaatgatacctttgctgtcgttcagtcctggatgtttgagacttgggaaccactcttaaattccttgggctggaagcatccctgagggaccacctggcttatccccccatcccccatcgcctgcctcggagcaggcagtccgtgctcacgtgtgccggaggaattgctgtgggtcccttttctaaaaatctgcagaggaagtctctatgttttctgcttggtagaaaatgccggcacccctccctcaaccttcatcactggatggtctggacatccttctgaacagctgactttgtttcttccttctgtggctcaggagtggcccacccatggaagcttgtctgtctgttcccccatccccccgaccccctgtgtgcccacagggggccatccagagctgtgactggccaggacacctcagtccactgtgctgctccaccatggcctggctgctgtagggaaacattgtccctcttaactctcacccaggcttttggtgacgtgaggccttgatgaaatgctttgtccatcgcttccaactcattgaaccaaggtggacactgggcagagaaatcatttgccaagagataggtatttgtaggactcgcataaattcacgtgtcctgtatcctgttgtttgtcttctccatcccaccacctcctcatttaaaaaatgcaatacaaagaattgtcttctaaagaatagctttagaaatcctcattcctttccattccctccattcccattcacattaaattagcgaatgctaatttggactgatagggcaccactgtgaaaaaggtgtgaagaaagatctgcttcttgctcatgggaggagaccccagcagtaattagattctcactgaagtcactgggtgccacaaactgtgccagtgcttacctcagactgtgttatttggtcctcatattaactttccaagatgaacattcctgtgtccagatgaggaacatcagggctagacataggtagccttctctggggtataatttgctttaagctaagtagtattaaacatgttaaacacgtcatctctttgaatccacataaaatccctaaatccctgtgagacagggattgttgttatcctggttttagatgaaacaggcacagaggagttaagtaacttacctgaggtcacacagcagtagtaagtggtgaagtggggtttgatccaccatgaatgactgcagagttcacacttgaactacttgctgctccacctcttttaagttgtagagcttcctgatgctggcgctcatgttttgttttgtcttttcctactattctgacataaatctgctggggagacactatatatagacatatataaatcagccagagaccagcaaaaggtcactgtgtaatcagatgccagcctgggtggtgcgtggagaggaatttagagaaggaatatgttaacgaggacacagtatttagtctcatgtctggacccccatagtaaggggacagtgccttactcatctttccatctctgggacctaactcagggcctggtacacattatatgttcaataagtactgattagattactgggaaagagttagtaggggagatgggacttgaagttttttgaaaatgatattaataactgtgacagttatttgtgaagttttttgaaaatgatattaataactgtgatagttatttgtgaagttttttgaaaatgatattaatggcattaccttttatggcatactggccaggtactcagctaagtttattatttagttgtattaactctcacagcagccctatggctattatgatccctggagtaaacttaggctgaagagagattctatatcttgctggaggatttaaagtctcagggtggttggtgttatttgggggcttttttttggcttttttgttgttgttgttttgagacagggtcttgctctgtcgcccatcctggagtgcagtggcgcaattttggctcactgcaatctccgcctcccgggttcaagcgattctcatactttagcctcgtgagtagctgggactacaggcatgcgccaccacatccggctaatttttatatttttagtagagacggagtttcgccatgttggccagcctgtggtggtttgtttgtttgtttgttttttcttgattttgaaattattttttttcctaaagcagagaagaaggcacaagtgaaggagaaaaggcagacgtgagtgatgatggcagaaagtctgctcaattggggtggagggatttggaagccagagagaggagcttatcttttttttttttttcctgcttataggtggaagttgcttctttaatataaagatttctggatctatgaggttaactgtgtccagttaattgaatttataattcagcaccaaaacgctgaaaagaattgtcttttatgtcccttaatgagtgctataaaaacaagtggtgaatctaattttacgaatgttcctttatgacttacctgataactagtagttgttcaacacaaaggacacataactcagtctggacctacactggctgcctgccgtaaaataacttgttttagaagttggccttcttgcttctcttgagtggcccagggattcacttgttcccttctctgctccctcttctcattgaggatcaggctcgggttcttcattctggaggattgagatgggttaccttccctgccagtccaggatgaccaagacctcacatctcattggctctttccaaaaaggggaagggaaagatatggcagctcattcagatgtctctctggtgcagcatattgcttctacctagaagttgcctggtgtgctaggaagaaaagagaaattaagagaaagactccttttgtctttaccctacaacgagaggtaaagagctttacagccgcagcagccgcattaggttagacattggtgagaacttcctgagttgcaaagatgttcctaagagagactgataactgtccatctctggagctgcttcagttgtgagtgggcacatatatagatgcccttatctttttatagcttttgtctttttttatgttttgaaagtttaatttgaattattttgtgattacagatcttacaggtagatgttgggtacaaaattcaggcattctctgatggctatttgagaaaggttggctgttcccatctgcaatagtcaggggcaggagcctggactcacaggccagtacagcactcagggagacagcctagaaatggaagggcttttggaggagggaagctcttgaacagagcagacagggtaggggtgtgggagcgttgatgaaggaaggccaagataaggctgtggtttccatttgttaccacctctcccgcttatcttgagtgagaacaggccctacagctctgagcgaacctttccatggggctgttgagctgtgaagaggacatatacgagctctcctatcctctcttcccagtgcaccctttcccttgcacacacaggcacctgtaaaggctgcagctttggtctattggatgggtggggacaaatgcagaagtgtccctgttctgggtgctgattacttcctagcagagctggggggtggactggcacatttgtccttcatgatctgagtcttacctctgctggccttgtgctcagactggctggtgggccatcttctgccttgtcccacccttactaggctgataaattgctgttccagtcaacagggctctgacccagcccttatctttggtcagaaggaggctgggtgacaaggacagggggaggggctgctgcacaagcccagcctttggacactggtaaccttttgtgggggaatgtacacccagctgctttggggcccagaggaacattctggcaagacagtgctatcagcctaaactcatcacaccggaggcagcctgcagcacatacacatttctcttgacttacaggagactggagatggagggaaataagaagtcacctccccttaccccctattctcactgagttggcatgacactaaaagatcccctattccctatcattttcagaagaaccaagacggcttgccactcattcattcaacatttattgcatatctactatgtgcttaaatgctgggaatagaaagatgactagacccagtctgttgattcaaggaattcagagttgagaggaagacagacacataaacaggcaattataatgcagaatgctgagtgcagcgatagagatatttatacacaggatactgtggtagcccagaggaagggtgctcagcagatacccaggggacagataaggcttctagaaaggaagacaccacaaggttttcaagaagtagaaagtagccaggatgaagggagagaaggacagaagaaatggaactgtatgtgtttagaaacagtgacactgtggcctgagtagctcagctgagatagaacgtggtggatacagttggaggcataggcaagcccaggccacagaaacttgttaggctgtgtttaggagcctagattttatccacagatgacaaggagttcttggaagcctttaaaaaggaagttatgagatcagatacattttggataggtcgcactggtggtgctgtgcaggtgagatcagagggaggtaagctgtgtttaggagacttttgtggctatcctgatgagggatgcttacatgatagaaaatgagctggattggggtatctcaatcctaatgtcaggcaagaggacctagaggccttcggggtgacgtccaggcatctagctcgagtgaccaagaggatgttagtgctgacagctgagatggagatccaggccaagcaggtttgagaggcgaagatgtgggtttcaggtttggatattcaggttgaatataagatgtctgcggaacatctagggagcagctaggtgtatggattttgtgcccagaagagaagtccaggctggaggcctcctggcttcctggtggtcactgagaccgtgagagtagagttcacctggacagatggcggggcatgaagcgtcatgagttaagggcagaacaccatggtggggatgagagttggggcaaagggcactgctcagcagagaagggcctcctgcagccagctccttaggctccctggaaggtgaggaaggcaggaagcatgggacctcaggtgcagagggcttctcagaggcggattctcaaggtatggcctggtgtggggatccctgcagatagatgggtctctccagggtgaggagcgctctcctggcccagctcctggcattctcaaatcccagggatctcttgtgaacagggccctggccctggggtaggagagaagaggctgacaggctgaagaataatctcagaactggtggggacttaggggattgcagatccaccctcttgcttccagggggattggatgggcagtcctccaggctgctgttggaaatttctcagagaaggacctgctgtgctgcacggaccttcctggaagtccaacccaggtgaacccttcttgctggttccattgctgcacgtaccatccctttgcacatgtgtctctcttttctgaggttcatcatgcttggttctgtcgcattgtctggagggaatacaagcaccctgattccttccaaagaagaggagctcagggccctgggtcctgccccactggggctttacatttcctgaaacccctcttccactttccctgtcccacactgatcctagaatgagcactccatttgggatgggtggccgctctccctctacaccctcctccagtggcttggcacttcgggaccagctgctggagtgattgacataaagccaatctataaataaagtctttttcttttctcataaagactttgtggttgagtttgccttcaaggtcaagatcagacctttctaaataaacacatatcaaaggatcattagcaaagcagcactgttaaattgagatattaacttctgtcaactgcttgtttcttttttgttctgtaactcatgactgcagtaggtttttattattttgtcctcaggcagtagcatctggcttctgtagagactgtaaaaattaaaaagcaacacaaatcattgcgagagaaaagcagtaaattcaatgataagaatttaaaattaaaatgtttcggtgcttttatattctgcaaaacatgaaatgagtgagtttgttgcctgttgccataaacctcacccagctaatcgtccgcttgagttttttcctgtctcttttgctcatcaccatcaattctgtcttggcacaaggcgtaaagtgagagccgtgtgtgtgtgtgtgcatgtgcgtgtgcacgcccatgtgctggcatgtgtatgcatgtacgtgcgtgtatatgtatagcggggctggggcagagtggtggatgcactcactgacctccacctcattagaatgggggagacaacagtagggaggcatcatgtgggaaccagggtagggaaggaagagttgaagattattacatccccatgggtcagagttcccttttttcatcaccctttctagttaaatacaaaaacaaaacaaaaagccccaaccaaccaaccaacaaacagaacactccaggtcacagacatgagcataaacagcaacctgtagcatccaagttaaaatgtaaaaaagaattccctgagcaagtgtgtgatgctggattaggggtctgagtgggtggctgggtctttcccattccagagatgcccagcctttggatggggtgctggggagtgggatgggaagcatcttaggctccttattccaatcagaagatttagggtttctgtgttgaggtcactcattcttactgcaaaatcgagttgtgtctctgggcctagctatgtcctgggctgtgagggagataaaagttgattggttttttttcttgctctggaggaactttaaaaaaagcttaaaaaaaaaaagtcttttaaacagtcagaggacaatttaagacaaatgtgagtaaggatgtgatggcattgtataagctgtttgcagacattctgggaagcgtgcagagtggtgtggggtgagttcaaggggagctattaggcctgagttgccttgaactaattctccagtctgttgggcttggggtctggaagccttggaaagcctggggtgaacactgtcagggtgagctcacccccatgtctaaaccaggccacaggactgggacagtgagggggaatgctgtgggtcccttttcacatagtctgtcccagtttgactgctggacccacaggcatgaggccagagctctttgtcccagacgaacttctccagcctagagagaggtgaggaaagagagccagtctttggcctccgtcaaagggaatgaaggaaagtgtgaagattagtggacggaggggtcgagttaagagggtatgactaataggctggtcattcagataggagagcacattgttctctgggcccagatggtccttggaataaatcagctcaggcagaagcagacttccagtacaaggaagtaggagcaactgcttgcctgctattctctaatgacatagcccaggcccctggccctgaatagcagccattcaggcctccactgtggtgttggagtgggggatgtgtgtgtgcaatgcatgcatgtgagtgtgtgagcaatgcatgcatgtgagtgtgtgtaaatatgtcatgttctagcctccgatgcttacagaagagtggatgagtgtttgtgttgtaaggagctggtacagggagatttttaccttggagcccttctcaactttaaattccaaccctgaaagccgtggaagtactggagtcatttgattaatgtctccttcagtagatgggaagctctaccagggcagggactgtgtcagtctgattcatcagtgtctccccagaccaggtgctggtggatgcttgatagacatagatggaagaaagttgtagcaacattcttatttttctccattgccttgcagtcacggcccccgttaattaagtagtatataagtaaatgaatgtatcagctactcctcccatgacttccctctagggacggtcatgaggacagagtgagctggggtagggatgcacaccacagcagttacatagagttttgggtggtgcaggtcctttatttctgtacttgggacactccacagataatgtggctttgaagcaggactttctgtcataaaagttttccaggtagacagcttccctagtttccctggttgaagacatgcaggcatgtgcaggtcgtagaatacgtgtaagcatcacggtgatccgtggtggtttttctggcatgatggccaacatttcagtggaagagcctacccactcccccctcatgccctacagtctccattcaaaggctgtgctagttccttttcccttcagaacccattcagcttcttaggaaggagggtagggaagagccaagcagcaatatcactgagtaaataggaataatcaaacagatactccctggagagagttttctttctatgaagatcttaattaatatgaacgctttgtcctggtgttctgaggcagactctctgtaccaaccgtgtgtgactgctgatccagctctgcctaaatcagatcactggggtctttcatcctttggggaataagctcctttggagaatcaagccagatcttgcctgttgggagattaaataagttgccctgtcttaaagtttaaaattaagtgcatattaagcaaatgacagtggaggccactgaagacaccttaggcctggaagcatttcagttagagaatgtttcagggactccacacacattcattccccttctccactccaccccactgtcatgccatcctgactttccactcactgtaaggtgcttcagaagacccaagactcaggctgccagagtggctgagttgggtgacttgggggttgtttctctcccattcatgtctgagatcatgaatggtcctctgggccatttcttgagtgtttcatttccaaggcctgtcagagggaggcagtctttagcattctctgactgtgctggtattactgggaaacaacagtcttctcttaaaaggcaatttcagaaaacaactgcaactgaatgactcaggaagaggaaggaaaggggaataggatgagtgaaatgtatggcccaagagcttttggagtctggaagaacaaaggaggaataaaggatgggtacgtggcaagaggagacccatgttacagagtgtccatgatcatgcagtgaccatccagcttggctctgctgtcgcctgcagagaatacactaatgaaacaagtgagtcttgggtgaggggtggtgtggaatcgtgcttggtggaagcatcttttgaatcacagggtctttcatgctgatccttgaggcgctgaaaacttcacagaactgccatctgggttcaaatggggacatttagaaagttcttcaaattcactcctctcaatgacttttgcccgaagactccaagcccacaattactttaacctgaatgaacagaaagtatcatccatgctgtttaattctcagtggcctcttggactagcctgaaagtcacagctcccccaacccccaaaatataagttaagaaagaagcctgaaggtgatggaataaacactacggcttgtctttcttatttttaggggctctttgagagagggggaatcaggaagtgtaggagtgagcaaagtgattctgggcagaaacctgaatggatatgacaaggacgagggatcctttgtccgggagctggtaaatccctgggggctgcctgtattgtcacatttgcttgcgaggacacctggcattgtatccaccactgccagatcatctctagatccacaagaaccaggatctttggccaggactgagagcaactcacatctgacaaaagcctgttcacctcttaaaagaagcccctttttattttcctagcaggagggtgttggaggtcatgatttctgagcatgctagtgacatggcttttggcatttccattagcatccctgttctagagaatccccatatgctgcgaaaattgatctcaaaacagtatatcatatatatcaccgtctgaggagggacgaaaacccaccaagagtgtgatttgtgggggcccattgcttgagtgtagagggctcagactctgaggtcagcttatgtgcctgagggcagctcacagcaggccctgcagggatagctgagagcctgccctggtcttggaggagaaagagatagggagtgtgcaccaggagacatctacatgttccaccagtgcccagaagttgttgtcaggtttgacttcagatcccaaactgtaggtgctcgttggctgcaatctcacagctttggccacagagtgatagccgttctgcaggcctctctagagatctgtgtcttcaattgtgaatgactcctcatcaggaagggacatctgggtagcactgcactgagtcccacatgaatgaatacttccaggttgagaggagaaaccaaacccacaaaagcctatgccctgctcctaacacatgtggatatgagtgtacacctaacaatcgcacgtattaaaagatatgggaatatacggactcagaagcctgcaactcatagggaattggggatggtgagtgggtgggtggcttgagagaggagagtaagccagcatgtttacttgagttgaagttggtcagagtcagatattaatggtgtaggctctgaaaattatgacttgcctggagctctggctcaagcccacagaagtattaatagattatttttaatgtatttatttgtttattaattcattcggtaaatatttattgaacacccattcttacttagtagtatattaggctctgggaatacagtggtgagcaaatcagaacccatgtcttcatgggtttcatgccttctagggaggcacacaagaaaataagcaagtcatatacaggataaatattgttatattggaggtataaggatgttattagagcacacgtgagcaacctccaacttggatggaggcttcctggaggtggtgtcatctaagctgtcatctgaaggatgagaagaagttaagacaatgaaggaatgggggagaaagggaagaatgccaggctgagagtcaaggtaggtaaatgtccagagtagggagagagtaagacaagttcatggaactgaaaatgggagtggggaggagggctaagatctgaacttggagaagtaaatgggcattaaatggtgaaaggcccttgaaaaccattttaagtagtttttgcctttttctggggacaatagggaagtaatgaaaggatcttaatcaggggagggacatcaggtgatgtcatggaaaagttactttgactacttggttttgactcaactggtgggtttaagctgaaggcagggagattgggataatattgccatcatttaggcaaagaatatggtagtctgaaccagtgttgctgtatgagggggtggataaataaatgcacaaaaagatactagaaatccgaaaacatttggtaattgatctctttcgagaggtgagagaggaatctaggataatgcccacttttcttgcttgggcaactgagtgatagtggagttctttactgaaatgaagaatacaagaaaaaagagctttttttattgttatcgttaggatactgaacagttttcatatacagtagcagggtgtgcatgacatccaaaggtagggtgtgcctaggaggcatgtgggtatacagacgtatctggaattcagaagagagagacccactggatatgtccattttggagttgtcatcaacatataaatgatcattgaagcccttggaactgggtgagtttatataacaagagagtatagaaagagaagagagcttggaatagaatccagaggaaccccaacatattccacccctccagaacaatcccaatccacgatggagattgaggagttgctggaagaaataggagggacaccagaagagtgtggtgtcatggaagctaaaggaagaggtttcaaaaagaaaaaagcagtcagttttagatggtgctgagaagtcccctaagaggcagactaaaaaatgtctgttgctcttagtgacatgggagtcgctgggtatcaaaggcaaacagttttggtgtcagtggaatgatagaagcaggagtgggattacagtgggttgaggagttagtgagcaattgggaggtagaggcaacgtgggtaggcagctctaggagtggaggaggtggttagttagaccgatccaagcttagggtacagcaggctggtgaaattgaaggatcccaggcaggggagttcaggaattggccagaagtcagtggggagttggacgacgggccttgaagtgtgggccgaatatgaaagaagtaaggaaaggaaaggcattctagggagatttttgaagatcaaataatgggtttggtgggagtaactggatgggagaatttaaaaggtgggaatgaggtttgaatataacactgtagagatagagctcttcttggtgatgaaagacatagagtgttctctataagcacctcctagagggggcctaagtgcagctcatggtacctgtcttagtctgttttgtgctgctgtagcagaatgcctgagagtgggtaatgtatacagaacaaaaatgtatttggttcacagttttgaaggctaagtccaagatcagggtgccagcgtcttacaagggccttcttgctgcaccactccatggtggaaggcgagagggcaagagagagcagagcacaagaggggactagattcattttttcctaaggaacccactcccttgagaacgacattaatccacgcgtgagggcacagcccccatgacccaaacacctcccaagaggccccacctcccaacactgctgcattaagatcaagtttccaacacaggaactttgggggacacatttaaaccatagaagtacctaagttaaaacaccacagcccactgatttaaatatctgtaccccacacccttcttcacccagccactggatcagtgttctaagcagctactgtttctccatcccctaatcatgtgacactgtgatagacattgttcatatattatctctaatctgcccagcaaccttgcatggtgggtactataactctaatacagaaaggaaactaagacccagagatactaagtgatttgcatatgattatgtagttagtaaataaatggaagagtcagaatttgaacccaggtgtggtctgacttcaacaccgaggctctttgctttgtacttctcagactgtaagcttcttggggccaagaagtattttcttatcattgtgtagcctcagggtttgattcctatacagaattgggactcaagaaatttgaggtgcatgagtgagtcagtaagtgagtaactgagtgaggggtacataaagtaactctctaatgctgttccccaggggaaataaagcaccaccacccaaagagagaaatgaagagcactggacagaagaaaggaagagcagaaagatttggccatcaagcgatgctggtgttgggtagctagaacagaggtgtctctcttcactactgtttctaaccagggtgctggacagcctgtggttggcctgagagagtcagccctaaggcctccatctgccccagcatcaaccccaggctccagagctgtcaggcagtggcccaaaaactccagaggaggagctgaaaggggaggtacctaagaaacaaaacccacatgggaggagagaaccccaaaccacgaagtgacattctacttcacgtttccttttagtgtcggcatctgaggctggggtttctctccagaccctccttcagagtgcccagggttggcgtgtctgaatgtgtgagagtgttgggagggaccacgctgcccatgaggagcatgcacaccacctgacatgaccttgaactccagccagatgcctaccagacactcgtcttccttccctgaaactgatttatagaatcaggagagcaacctacttgaaaggagggtagttccagatgtgggggtaatgggaaatgctagtgggcaatgtgctcttttattttactatttttctttatcatatcatattcctctctctccctccccaaatagcaagaaggacagtatcttccttccaggctttaaaatcccttgcatgcagcctgacgttgcctaaaagcctctccctcaggcctacggactccctctcattgcttgcctattcagtaagcctataaatttactgtcccctgtccaccaccatcaccaccagcctgttgtggcagggaaggtggcctggtgagcccagtggactccagcaggactgcagcaaggggatactgctttgtgcagcagccggagcagcgctgtccctgaggtctgcaggaaagtcctggggcccaggaagacagtggcccatcacccccagtattgcacatcaggtatcccccacctgtgtgcaccatgcacacccccaccatccacctcctgggccccatgtgctgggggaaggtgtggtcagcagacaggggaggatgtcatgctgacggagccccttagaacaataggagcttcacaggatcacaaagcctatcccccctcaggttacagaagagttgaagtccagagaaatcaaattcatttgtgcaatcctttatccatctattcgtccttctctccatccaataaatattcattgaacacctgtcagaaccaagagatagagtgctgtataagagaagtgaggtcgcagctctcatgcagctttcattctgacaggtggggaagacagtaaaccttgaacttaaagcaagtctctaagtcttgtgggtgtcacagctgaagactaaggctgggcctcctgtagtgtcctttgcaaggccccatactccctgcttcctgggaggccaagcatttagtttggctctccattgcagatggagaagtttgagggaataaataccagtttggactagatacttctgggcggcagaagggtacaggtagtttcagaccaggattggtttttaattttttaattttggtaaattatatgtaatgcaaaatttgcatttttaaccattttaagaggacaattcagtggcattaaatacattagcattgtcatgcaaccatcaacacacactgtatctccagaactcttatcatcccgtaaaacagaaactccgtacccattaaacaccaactccccattccttccctgactcctagacagggattcttaacttttttgtgccattggctccctggtcagtctggcgaaacccctgaactcttcctcagaatcaggtctctaaatgcagaaagtaaaatacataggattgtcatggaaacttgaaatacaaatatcaaaatattttttaaaaaccatttgtaatatagtaatatgtgtgattctttgttatcccattaaccaataacatcaggctgtaattgaataactaccatatttttgcgggagtggcttgcatagatgatattttgagatgactgcaacatttctagtgcagtgtgaaaatacctgtaatgtctaccggtgaccaagtagttaccagtactgcccatatgacttggtggttgcttatattcctaatggaaggagctactgaatttcagttggaggttggtgaaaataaagatgtcacttttttcccctctctgagttcaccaatctcctgaattctgtccctggacagcttaggggttccgtggactccaggttaagaagccgtgcctagacctgagctcactccccttttctgcctagaggggcagtgcacagtgcacggggctgggagcgtgttgatacgtaggatgtcgtgagtgaagcagtccctttgcagggcatcacaggagcccagccaaggggaaaaggtgcccccactctccccaggccgccagcctgctgtctgaggtgggcggggccggtgccccctagaagtgtgccttctggcagcttcccccgcccccttccaccctcttgtccaagggctcaatgcagaagggagccatatggtcctttgtggacacattttccctagtacagtatcttcctggtgtgaatgcaggcctggcgggcgccctggtgtcagctgtccctccccttccctggcgccccatcccccatagccagcccagagagtagcaggttgtggggagtcggggagccctgcagagtcggggtgagtaaggagtctttcagtaacacccacacacacactcacacagaaaactgtggaagtgaagtcaaacgtctcaaagtcagatccctttttggtatgaatttgctgtgtctcattctgggcactaattccaatttaattgcgagtggcctgaagcctcttcaataggagtaacaaatggtttgattttgtaaacttcatcagactgcattttaaatgcgacacagtagcccaactcgaatgccaatgaagcactggagtagctctctgtttactaattatccgtttttactccaagccacgctggctggcttgtctgattaaatcggatttgtgggatagagaacagctagcagagttttctctatagtaaacgagattgaaactatgggccgcctggctgcacactgtaaattatatttccttttaaaggggacgtgtctcttttatttctctgtcatccctcctgcatattaaactttacggtacagaagtatacccggctgcttctaaatccagcctctcaccctccacctggtagcccactctcactttctgtgatttccgtctccttctctgaaggactggaaaggaaattcgtagctacgttctctgctcctttatctttttaacccttttcttttcttcctctttattctggaattggcttttcattattccattattttcaaagatacctgtgatgacatggatgcttagaaactatattgagttagctaaaagagagttctggcaacagaatttaccaggacctaacacagactgggttttagctttttagaaggatgtgaagatgggtggtattgggccggggcaggcaggggttgggcatgaattggtaatgatagtttgaattgtgaaaaaagagtcaatttctgaaaaatcaaatgtgttcctttggttcacctggaatgatgaaatcccttcctctgaacgcagtgaaatcagaatcacctgatttctacctgtggcccagcggagaaggccgtggggcaggtgttggaagggtgaacgttggtggtcccgccctctcggttgaagcccaggttggggcagtgggtgtgtcctctttctactccctggctggttctgggtctgacgtagagctcctgggctcgatttattgtttattcctctgaccctaggaaggcaaaacaacctctgtccttggtccttcctgtaatgtgcacgtgcatgtgcaacacacacatgcacacacatgcaggtacatgaaacaaacgcaaggagccctgaatcaggtgtaatcagactgtgcgtacattctgccgttgctaagaccaactccatgagctcgacctgccctgccctcattcttggtatctatgtatgctctgggagcttttttatattttaatttgcttctgaatgtcctgcagaattaacagtatctgtctgcacttttccctttttggctattgtgtgccgtacagtacgggaaggccgcatggtgtctctgatattgatagcctggttaccgtgggaatgaatggccaccacactctcaggcccacagccctccttttaattgttgacagtaaaaagcatttaaatgctgcttaatttgtaatcatcttctgtggggggggggggcggaaaggagaggagccattaaaatgtcagtaaaatgaatacatcctctccttttttgttattttgttttgcttatttatatggggtagtttttcttttcattgcccagtgtttgggagatatttaaatggcgctgaaacaatcagtatttcgttttattttgaatttctgtctcgcccaacccctgctcccctccccactccattctgtctccctgggcctttgtcttgcctctgtctctctctcttttctgtctgggtctcctcctgcctcctgcctctgcctccacctccctatctctggaatacattggggtttactggaaattttacatgagagcctagccgaggtttttgggtttttttcccccagagaacctactcctgggctgcagtttctctgcaggggcctcaggatgactttgggaatgtctgaaactagagagagtgaccatctatagaaagcatcttttacacgtgaagtatactggagatgaaagagtcctggggataacttattgttcagacaaggaaattgggtcttaccttcacgtggaaactccgtgcctcccgtgaagctctggacacacagccagaatgtaaatgcctactatgtgttggacactgtgctcttgtaatgaaactgctagattcagagggtctggttctctgacttgctctctatatgggctttcttgggggtcttctctatcattctgctgctgggggcttgggagagaaagctccccctccatattccccaccccaactgctcagccctcacctggcacagagaggcttcaggtactctcagacccagctactcaataattgcctctgtgagtgttcagccagttctaggaggtcttaagctgctaactggtagtcccctagaaaagggacctagaggttctctcaagtcctgtgaaattttcccatcttcctaaaaatccccatctcacagtgctgcttgagaaaggttgaacctagattggcacccagcaggtgcccagtcaatgttggatcctttctttgccttgtctgtgactgtccctctgtcagcctaagaatgtggttccttttagttaaagagattctctttagctaaaagaaggctgtgaagtctgactttgaaagagaaaatgctgacgtccatctcagtgggagaaaggaccattcaacctgccagcaccctcttcaatagaattgttgaatattagagtggagaaaaaccctttaaggatcacttatatccctcttcattttactgttgaggaaactgaggcccagaaaggtctagtaacccacccaggagtgcacagcgagttagtcactgagccaggacttgaggccaggttttgtactcttgttcctgttcagttgggagtctgcagtaaaaagccacgtgagggcaagaggatggctgggatgtgaagatcctggcctgccctttcatgctccgtcccgatgttcccccacccgctttggggcttcttttcctggaagcctctaagatcagctgaattcgagaccaagggacccatatttcttgcagtgctcatgcaaccttgcagagggttacaggcagaatacatgccagggaatggacttaggaagaaactgattgtagcttttggtttatttgctacccatctacccccaaatgcaggaagtagggagccctttggctttaggaaccctgagagtaaacaggtgcctgtctctctcctttgaacttcatttctacagaacaagcagtgtagagaaaccgaggaaaacagttctctgcatcttgggagaagttgttgagcacggggccctcaagtcggcaccctgcctacttgctccatcccacagtccatcattctcccagcctgatcccatctcagaggcacctctctgccagaacgggcagtccctgagagaggcttccacatcagatgccccacccagggttgggctgggttgggttgggctgggctaggctaggcttgctctgcagagctgggctaggttaggctactgcaagctgcccttctcctctctgggttgttgaagttggtccgatttttcaatcgtgggccaattagtttcacaaatgggggcccccgtggtgccagggcacatttgttccgggcctgcgcactggccaggccccattgttctgcctcccacccccgtgtgggcccattgtcctcgcccccagcgggtgctgcttactgctgatttatacgggcaggcgtcctgcgggctccaggcttctctgccacagctggcggaggtgcttaaggccttggaccccgtgacctttgccctagtcctgctgtcattttgaaagttacagaccagagggctgcatacctctccggatttactttccaccccaactcatcccccccgccccacccactctattgcacatacgcatgcgcgcgcgcgcacacacacacacacacacacacacacacactctcacactccctttccttcttcctctgcttgctcttggagaagttttaattcattttggaatgtctggaagggtccagccactggactggaaaccaagaagaaggagctgctggggcaggtgggaggtaccagccgaggatattagtctctgctgatgtgcttggaagcagctacttcccggaatgtggtttttaatcctcggattcattagttccatatctgatgctgggaggaagggaggaggatgttgctgtcggtgtggcactgccagggaatcaggacttgatttggcttcttgcaacttaacatgcccccttcctgccagaggcccctgcaccctagaaagggcaacgcagcgtaggaggtagattgaatgtgaaggtggttttgtagcccagtacgaaaatgcagatcttgtcccctcttaacccgtttattctctctctccttgcaaaccaaacttctctcctcctttttttttaaaacctccttccctttttttatccaccccttttcttgtccccctccctcattttctccccctcttgggctggtttgttggagtgattgacaaaattagtaaatccattcatgttacttttattgtgcaggtctcaataaatcccccatgtccagggcgcaccttaatgagctagtgagctgacaaatttgtttactgtagctggaggtgccgagtaatgaaatgcacttgtgtctgcagctcactgctaaacaaatacacggttttccgggagccagctctgctagctgctgctgcctgaggacacagccacattccccaagagactgaaagttgtatgtgtgcatatgttttgaaaaatgtaatcactctctcatccattgcttagttttaaaacaaatctgaatcagctgctcaaactcctccccttttttgttatgcaatgaagatgcttttgctcccttgactgacggtattgaaaccgtaacattccccttttctcttgtggaaatggaatgtcatacagatgtatagatgccttccatgattctacgcagataagaaaggaaggaaaaaggggcagagagggctggataaagagacctaaaattgacaaggacgaaattgacaagtgatgctaaggtttttggctcttagcttggtttgggaagatgtaactgaacgcctcagcagtgggtgactctatatgcaggagacaaacacccatgcatgagctcaaagctaattgagtttgagacaagtcttcgaagatggtatctttgtgtattctaccccagtaaaaggaactggggaacttgtctcccactcaccagcagctgattggagtttccagggttcggtgggctgatttggccttcattgcccacatagctagccttctgaggaacgccaggagtacagtagtgcatctctaatgatcctgaaactcatgcccaagaggaaaaccagagaactaaagagagggctcttggccatttgtccagtagattccttgaaaaggaggtgagccctaaatgatagcacagtggaagtcaaaatggaggagccactcagattcaagggctggactttgttcctttctgtctattcctcaccccaccccagccttctccatccttttaagatgcagacagagccttccttccttgggtgggagtcagcctgatgctgcttgcctctgcctctctttctctcttgccgagtggatggtacagccctgctacctttttcagcagcaacctgggggcaaagggaggagaagatgggtgaaaggaaaaggcgtcagtttatatgatggtttgaatgtgtggtcacgaaggttgcccatgctggagatggtgtcttaggaaagagtaatcccccaggatgtcagagggagcagaaagacatatctgaaggatttgggggctgggggtggagggagggggaagtttctagtttaaatcaaggttttcacaccctcctaaatttgatattttctttctgtggggagaagaagctttcggggtggcaggggaggcagtccttcctttgttgggtgaggttgggtaggattggacgtgagaagcccctccggggtacatgtgcatgcacgagcacacacgggcatgcacacaccccagcacatgcacacacagcagtcccagcctgcttaccaaaaaaagctggagtatatttagatccctctgctcctttgattaagaaactgcttatagcaggagataataagagctttgctccaagaaggtgtagcacctgaacatcttctccagctgtgtacccctctgatcctcttccttcccatctattaaagagataattggtatggaaatggcacaggtgtaaacatgaggggttttgtgtttcataatttcagaccccgtcatcacctgggtgaaataccctaggtctgtgtcaccccttctgcctactattccaccctggcctggctttctccctttctctctctttctttctttccctctccctttctttctttctttctttctttctttctttctttctttctttctttctttctttctttctttctttctttctatctttctttcttttctttctttctttttctttctttctttcttttcttttctttccttccttccttccttccttcgttccttccttccttccttctccttttttttttttttgctaaaattaagcttgttttaaattggaagactttgagtcatacatgccctgtagtcaaaactggcagtgttgccactggggggtctggtgtgggtcaccttctctggagatagaattgatgcaaatgtggtcccagatatttgcatggatcctgcccatattactaagagtcatgttccttgagtcttgatagcatcatcctttctacatgcatccccttttcctacttcagattccctttgagcagataccctgggagtccaggctaagactgagtcccattcattcttcagaacagcagaggtgctaattccttgacctgaaaaattattttcttgggtcaaagctgacttatatatctgatttacattgaaatgtacagattgatagaaaacaatacatttttaggatttacataatcaaaaacatttgtcagttgcatcataacagggctatgaagttagggttggaaagggcaggttagttatgaattctcttatcctagatgaagaaaccaaggttaaggacaaccactgcctggactaggatcacaaatccaagaagggctgtacctctgggccagaattgggatctttggactgtttcactgtataatatggcaaaactgatccttctatggtctgggtttttgcttccgagcaacagagctcagacatggagtgacaacgaaggagtcctgtccagcccaccagacagacacggggggcctcagtgagatccgctgcctgtgggtcacttgtcattactgatttccaaggagagtcttgttggatgctcttagtagtggtttcatttgtggactgtagtctgaactttcctcatccctagccctctgtctgtaccatgactctcctcatacctcctcctctaccctttgtgattgtcttacaaccccttatttattttctaattcaacatgcagttattaagtgcctactccatatcaggctgtgtactgtgtgttggggaatataaagatgaatacaatagttcctactttggaggcttataatctattaggcagagctgaaagtccaaaataaatgcaatacagggctttacgtgatacaacagagctcagaggaagatggtgttgttggcactgaatcctaagtggtgtaactcctcaaagatgccttctctagggtcagcttcccagaaagtagcagcccaaagacaacaaaacagcttaggcatgtgtattgtgcagggctgccatgactcatgatccaggtcgttcactgcacaagggtgcccagctgaggagggaagatcccaaaaccctgccctctctgtactcaccataaatatgcagccaggtctgtggggctggccagaggaggagacgtgattttctaattcagatgaaggtgttgtttggccatcattggctctgtgaccacattataaagttttttcgtgtggatatctcattcgatgttcttgataaccacagtggcagataaggagcaaatggatctggtgaaaagaatgacttgctcggggccacaaggcaagtatgtgggagagctgggacccctgtgctgcttttccttcccctgtgtcatgtggaccatctgacttctgagggtctcgtttatccagtcagagcacctcccctctccccagtggtaccaggcctgacgtctctccatagcagaggacggaacccaggcgttgaagggagcagagcgttccagtgctgccgggcccccctgccccgccgcacatctcactgcagctaatgaattgctaatacaattttctagataattttatttccatagtcccacattttaatgtgtttccaaaagctagcatttatttgcttaatctcccagtgtaatagaatctgccctgactcatcatacatgcgaacaatcagctaggctgaaacgccagcaaattgtttaataactcacatctagtctctagatttttaactcgcatgcaccaatagcttttcttgtgtctcatccacatctcccccccttttccatttttttaaaaatacttttctatcatcatagctgttagtttctaagcagaaaaatggggaaagtggatgctgagtctcagaggctcccctttcttcccctgggagccttggttggtggatacgtgaccaaggagcacccctgcaccttgtggaatgtcccaggaaggggagagagaccactgtagggacatcatagtgtttcctttccagctggtgaccatatgacttccagcctgttggccagttgtggaactggccatctgggattttttgcgtgccactcctcccttgctgtcccacctttctaggattttctctctccctttgccctggcagcctctgccctggtctggtccctaccctcctccagtggcccatcagccctctcgctgcttctaaccgcttgctgctgctgttggtccccatgtgtgcccagagtcactggcttcaaacacaggtcagatcgtgctagcaccactcgtcttagtcaagtcaggctgctataacaaactgccacggactgggtggcttatacacagcagacatgcatttctcacagctctggaggctgggaagtctgtgattggggtgccagcatgttcaggttctggtgagggtcctcctcctggttgcagactgctgatttctcggtgtcctcacgtggtggaaggggctagctagctctctgggccctcttttacaaggacactcattccattttaattacctaattatctctcccaggccccacttcctaataccatcaccttaggggttaggatttcaaaaaaggaatcagagggggacccagacattaggatcatagcaaccctcggtcctttcatggcactgcattgcctgtagaataaagtccaacctgtcctgcctggcatatgcagccctctgatctgactcccatcaccctcccagcttgtctccatccccagggcctgaccttggccccatctgctctgacatttgccagtggtgtctctctccttagcctggcacatgtgtcccaacttcttgtcctttgcttctcagatactcaacttttaaaagcctaactcaaaatctcaggagctcttggagtcgccctgccttaccctctgggtggttgttaactcagcatctcccactagtctgggacccagtttctctgctcagccttagcctgcccctggtcacctagcacagtgcctgtacttggtagtggctcagtgagttggctgaatggacatgaagtgggttcaggccaccctgagaagtagggacagcatagtggggcagtatcgaggggccttggaaagaccaagggggcagagtgctgcagtctgccttgctgggtgtattgacactcagagcacctgtgggtctggctgtataggctgagatgtcctattgggaatgccattcatgttccctctgcccaggttccttccatgccggggatctcagaggatgcataaggagaagccttggctcttaaagggcatggctggcctccaaagcctactcaaccctactgatttaaggtagctgtttgaacacctggcttaatttgggctctctgtggggtgggggttaagggcagagagggagtagatgctgggggctctcaagttgaaggagtgggggccaccgggcacagaacgcattgcagatgcactgtcctcctgtgtacgtcggccaagcagggagggatattgaagactcactgtcaactcttggcattgcttctgtccagaaagatacatctctcattatgtctccctccagcaagtgaagctgagtagactactcagcatttctgagagaccttggtggctcccagtgggattggaaggcctcagagagctatgccttgtgacccagccccagctactgcccactcctggccaggggttctctagccattgctggagctgtactagaggcaggagtcctctgtaccgtccttactgggcttcttccagggtaagcccagacaggcgggcagtcagctccagaggtagcattgagtccagccccgtggtttctgaaagacaaaccgagatattttcagatcccaactctgcctctttctgtgtgatcttaggcaagttatttaatctctcttttacactggtaaaaagggggataagaatgcctgccttgtaggattgcaagttttaaatgaactgacaacatagataaggtacctagcataacgcctagattcgctccccttccttcctgctttttgttggccaggagcaaaatccagtgctggctgtttttctccttccctgctcagccttcctgactgctggtgagatggggcgtggctccaggtgcttagacttcagtgtctgcaaagggaagggatatcagggtgggtgtgaggggcacagaagtgtgggggacagtgagaggtgggccttgcctgcctactagtccatcctaacccagccatgagtgggacggaggtggtgaggaccagacctctcacttgctatctccattgatggccaggaaggcagggaggttcttcgtgccatcccttctcttccccctaccttccaccagacacttcccgattccatgctgagcagcccatggcttccagcagccaaagctttaccccctccccccacccactctggactggactgacagatgctaggcctacttacgtttcctgcttgtgccttcccacacaggggacagcggtgtggggccaagtgcaggtgatattgcccaggcaccagcacagagacacacagatgggcctgccggggagctcctgtgctcaggaaaacagagcccaaaagggtgggcactgagctgccagttaggactcagacacaaggtcagatacttcctcctgtggtgctgcagctggaaatttcggccatggctccagagcagtgtcagaaagggattggtaacaaacagaaaatggcagcctgtatgtgtggggtactttggggatgaacagccagttagaattaaatgaaaatctcacatcactcgctagctttcaatcctttgacagttgcccatcgggtttaggatggaactaaatctcttgacgtggtttgcaagaccctgcatggcctggcccttgcctttccctttagcctcctcttcttccccagctgcactgcaccattcctctgtctgatcctcccaccggccatgtttcctcctggcccagagtgttcacagacactattccatcttccggattccgccattcacctggtgttctgggtaacgtcggtcatgagagcagggactttgcatgctcttccttggttatatccccagtgccaaaaagacagccttgcttgtagaaggcatcaaataatacttgttgagtgaatggacctaagattcatgctttagtgagtggagaagtagttaaaaaaaaaaaacaaaacaggatctgtagctagtcttgggaaagcattaaaatctagggtgtgtgagtgtgaaccccagccctgccacttacgaactctatggcaggagtccccaacccccgggccatggtctgtgaggagctgggctgcacagcaggaggcgagcgagtgaaactgagctccgcctcctgtcatattagtggcgacattagattctcacaggagcatgaaccctattgggaactgtgcattcaagggatccaggctgcacactccttatgagagtctaatgataaatgtaatgtgcttgaatcatcccaaagccatcccccaaccatacgtggaaaaattgccttccatgaaaccagtcccttgtgccaaaaatgttggggaccactgctctgtgggattttggccaaagtacttaatctctctgtgcctcagtctccttgtctaagggatgaggataacagaggctagctttttgagttttggatttatattagttatgttagaacaatggctggcccatagtatctttgttattgttttttctcgcagggtctaccttgcctcccccactttttgccctgtactctgtgaagtccatctggtatatgctgtcttagtaccttgccgccttttacataccacccgacacagttgcccattacccttgctgctgcgatgtatttgatcaatgtctatcctttagctttagcttccagagctcgggaacgacgtcgattttgcccatcactggggccacatactgggtgctcagtgttgcatagcctgggcccactctggatttgcccctgagcatggggatttggaggtgtgagtcccgacactggctctcactccagatgggtaaagaatgcaccttgtattcccacctttctgaggcaccccctctcctgtctcccacaggcactgacatggccgtcttctgtctgctgtgtgggaagcgcttccaggcgcagagcgcactgcagcagcacatggaggtccacgcgggcgtgcgcagctacatctgcagtgagtgcaaccgcaccttccccagccacacggctctcaaacgccacctgcgctcacatacaggtaggtcagtccagctgatgggtggatctgggtctctgggagccagcgtctatatttacctccaaggacgtaaagtggaggtggtgggctgagtcagccttcagtccttctgctcaaggcttggacgtgcagaggctgcccgtcgtgcaggtaaatgtggacagttctcccagtcccctcctgtggaccgtcggttcaaagtctttccgtgttcaacacaggatgctcattaaaaaggcaggctcttgggtcccactctcagaaccttttattccatgggtccagggtggggtcccagattcagcattattaatatgtattcccaagggattctcatgtaggtagacccaaaatgaattttgagaaaaactgacctgctgggtctcttaacattgtctgccctgcctcccaccactcttgatgccccgccgctctatccatacacatttctgaagtcagcttcgggcttctgagggcaagttgaagcagtgatcctactttccccacagtaacaaaggcctgtacttggaccttaaccctgtttagggaagacaaggagggcatttaaacgatgagcaatgaaatatcactgctcagccagttccaggtgatgggacaagggagggggtacgaggtaaggaggctgggccaggtgctgaggggctggccattccctgccaccagcctctagggcttcagggatggggacacttggtccctgatggccaagaggcatttgctttcctgcagcagctcccagttttccctaacaggggagtggatggcttaaattccttattttctctatgacaaaactggggctctgctgaaactacctggttaaaggaatgcccatttctgagtctgcctttgtgtgctgtgtttgtagggagggttggggtcaggtctctatctgggtatataacagagcgtatacttgtaaaaacctctgcatgccacgtaaaggaacagtaggccctctcctcattttgagagtcttgtcacagctcagagattgagtatgcagaccaggtcttgcatgggtggcaggctctgctaaataagggaagagctttacttctcatggactgagctggcctggccagccagcagcaggtatcctcattaaggagccttcctggctgtcacttctggatgccattttgttcaggggagcacattgtcttagcatcaccagatttgcacagaactacttaaaatttctgggacaggacggaggtagggcccagaggggtgggctcaataaaaagggcccaggagagtgggatgttgacaaggactttctctacagcgattgcgtaagcatttcccctgcagctatatgcaccttcctatgaacgcctccctcaacagttccccaggttcattcggtcttatgaaagatggctagatacctttcagccacttctgagcatgccactgggtccaatcagttggcttcatgtgacttgaatgatctcagtcctgctaaatccacccaggatgtgccctgctctgaccatgccaccttctcagagctcagatatgaaaatgtcacatgctcttgtgtcagtcatggctcagatccacggggaggggctgtttccagagttagggagaagcccttgcttattctaggaaacacggagcatgtgtgctgcctatgcacacacagagaaacacccatcaattttcacaccagcgaggcactgcgcacacaagccatatacaggctgtgcacaccccacacacaatgcctcattaatattccgttgttcttggcccatttgctgctggggccgggtgtttagcatcagcagctgtgtttggtaggttagtccagccgtgctcttggcattgatggatccctgattcacacggctcatcatataataaactctcagctgtgctgaagggaggggctggaagggaggggcctgaggagccagcaggatggggctggggtggggaggacgacagacactgggcttggccagtgccagagaaagcaccaagtaaggacagattggggggggcggggtcacaggtgcactgggcaggctggagggggctctaattagtctcgtttgtcctgcacttaatgtcaagctcattaaagaggctacagagttaatcaacataccacaaattggattttgagttctgcagccagttttgtgtacattatggccacactgacacaatcagctctcagggtgaagatttcacgccaggtgcacaccgtgcttccaaatcgggatggggatacgtgtgtgttggtgactttttctttcttttttttttgttgttgtttgtttttccttctaagttctttttattcttttccctgggcagactcaagaatttcctatttaaactcatttaacatgtgctccacttcataattaaattcctaaaaatcggatcaaacaaactcctctgtcttaaccctttgttttttaaattgttagggacccctctggaggggaaaggcacaggcagccgcccccttcccccccaccgccgccttcacccccacccggctgggtggctgccgatgtacgttttaattaccggctccggctgaagtctcacgtggccttggctttatttatttatttataccttaatgaggatactgaatctttgattaaagtcgtaatcgttgccgattcagtaaggagggggagttggatgtcagaccagacagggctgtgagtgcagacacacggagagagtgggttcgggtgcacacacagactggcccttactgtgttagacacacaactaattagtaccagggtctgcacaggcctccactcccttgagtttgatggggctgggggccaggcagtccgcatggctctggcagtgaggatgggcaggtagcaatttccccaactgagaaccctgggccttggcccatccccagatctgcaggtgagggactcgctggccgagcctctgagccagtgcaacaccccatagattggggtgaactggtgtcaaggcacgatgccactctttgagcttctctcatctgattccctgatggaagtgcccctctcatggcatgggtgcttcttgcaaatcttccacccatgagaaagtcactgatcagaccccagcatccgctcccctcagagccctaaaaacccctcagagccatcagaacagatgagaatttatgtgggtacaggggcctaactttgggaggggggagctttggttagtggcccgaggaggggagagacaggagagagtaaaatatcattttaaaaaggaagtgaaggcacaggcatgcgagtctataacgagaaggacaatttatgcccaggcacgagcgcagtttgacatggggataatgcaaaaacgtaggtcattgtggatgacttaaaccttcagcagctgaagaaaatgtatgaaatgcagaggacattacacggttggcagccccgcacatctgcagagggacaagtgaaatacagtgggccattctttaccataaactgtggttgttggagatgcagcccagagaaattgtaattacagtgacaagacgaatcagcgatatttaaatattcatgaacaaagtctggggtgatcaatctatctttattgtctgcgccttcactcctgtaataaataagtagctggagtcctcacctttcatcccccaagccccccactttggatatgaaaggcaagatggttattctccacaccccaacctctcatgctctggagatttaagagtgggatcctcaaaaaagaaaaggcagttctctccaagtttcatagacccaccatttcctgggtctgttctggatcctccctgtgcgatacactgaggctacaaggatgggtgaggcttgcttcttatcctggtggtgcttccatgctggaggtatggtgggcaagccagtagatacagcatagtgtgtcagcaagctgacaagtatatggtaccctgactctagagccagacccaaacctgaatcccaactcagctccttacttgccgtttcaccttagggatgatgtggaagcatctcatttttttctcaactgtaaaatgagactaatatctttctttaagtttgttgccatgatcatctgatgcgatcacatcacacatctgagtgctcaggaaatgtagcccattttaatgcgaaagtggcataaaaatgataccacactaataacagaacaaaattctgggcatttcttctctttggggacacagaagaaagtgtgattcattctgcctggggaactaaagggaagcgtccacgcgggggtatcatatgagctgggctttgaaggatgattaggagttcaccagggagaaaagaagaaatcgagcagaggaaacagctatgtaagactgtggaggaaggaaattggggactgtagaaggtgtttgggggacaatgtgaagttcctcaaattggagagatttctttgaaggttggggagtcaggctggagtgactttcacccttaacctaaaggaaggggagaagaggtcatctgagaagcaagatggtgaggtctcatgtatccacaagggggcttgctttctggggactgctgtccatccctgaaccaaatgggctctctttcccaggactggcccttgccccacagatgatcatggggccacagtaaagtatggtcatgtgtgaagacaggtattgcttgtttattcaatggaggtgtggccgtggatccttaagttgtctttggaggtggtgaatacaggccgtcgcatccttctcatgcacagaatgtgccctactgtcccctgaagagggggcagggagaggcaaaggcctgatccagccccttgtctccacaggcgaccacccctacgagtgtgagttctgtggcagctgcttccgggatgagagcacactcaagagccacaaacgcatccacacgggtgagaaaccctacgagtgcaatggctgtggcaagaagttcagcctcaagcatcagctggagacgcactatagggtgcacacaggtaccgaaggccagggaggggcctgagctggctctgggacctgggcggaggtgggaagcagatagtctcctagagaagcctaagtgaggatgatcccaggctgaatcaaagagtagaagaggttctattaagagctggtatggtggcctgaggaccaccacaccccagtcaaggtggcctgagggccatcagtcaaggccaaggcagacattactaatcaatcccagcacactttccagtgagcccccatcagccctccaggcagctataccagtagttcagaggtgacatgcaaaatgatgtctgtatatgagtcctgaattaggggtaagttggtccaattagctgaaagtgaaggttagggtaatttcatgttactcaagggttagagtaagaattaggatacattgaattaggttgttatgaaggttgggaagttgtaaagttagattgtgtttggttctgagattagaagagcagatatatttaataatccctatatgcatatgatgttttaccacttcagagtgccttcacatttttttttttttagacggagtttcgctcttattggccaggccggagtgcagtggcacgatctcagttcactgcaatctctgcctcctgggttcaagcgattctcctgcctcagcctcccaattacctgggattacaggtgtgtgccaccacgcccagctaattttgtattttttttagtagagacagggttttgccatgttggtcaggctggtctcgaactcctgacctcaagtgattcacccgcctcggcctccaaagtgctgggattacaggcgtgagccaccgtgcccatccacattattttttgtattggaaaaagaaatgtgggccactgttttccctgaggtcaaaagacaaaacaagtgaagggtcttccacagtttcccaagttgggggcagtgaagtcctggagcttgcttgtgaaagctaatttttcacatttcttcacaacttcaagttcagtgacaccaccttagttgcttaaaattggccactgtaggagtattcacatcatagcaatcagcagatgctacaaaccagggctttttggaaagccagtcatgaaacatttaccaccagcacactgctggttgtggggaaggttgatttacagaagggtgagaggtggtggaagctggaaaacaaagacgccccctctgatcaggggagacagctgtcctgtccagaggaagggggagaggtggcttcaggcaggtcctgctggcttagaggagagtacgttgcccttggaggggaagggtggacagaaggagcagtaagcagagctatgtgttgtcagagctcgtttttcgtgtcccagtttgagcccacaaggagagggttgggtgtccgttgatgacaactatagtggcccagaggatttcccagagccctggggtttccttagccccttgtcagggatgtgacctggcaggtggatcattaactgtattggcagtgactattgtaaatagctggtcgatagttagatcactttggctgttcattacttcattatttgctggggcctgtgcgcgggggagtattgatagcgagatggctggccagttaattactgtattgaaacaaggttcccttacatcctctgctcagctctaggggactctatggaaggaaagttggggtatagaacgctagggtgtggctgtgcactcccaggttctttatccctcccatcccaccccacccccaattccagcctcaggagggaggcagggtccagggcaaggtcttagcggttttagcaggataggccgggtgggggagctcatgcctataatcccaggactttgggaggccgaggcaggcagatcacttgaagtcaggagttcaagtccagcccggccaacatggtgaaaccctgtctgtactaaaaatacaaaaattagccgggcatggtggcggcacctgtgatcccagctacttgggaggctgaggcaggacaatcacttgaacccgggaggcagaggttgcagtgagctgagattgcaccactgcattccagcctgggtaacagagtgagactccatctcaaaaaaaaaaaaaaaaaaaaaaaaaaggccgggcgcggtggctcacgcctgtaatcccagcactttgggaggccgaggcgggtggatcttgaggtcaggagatcgagaccatcctggctaacaaggtgaaaccccgtctctactaaaaatacaaaaaattagccgggcgcggtggcaggcgcctgtagtcccagctactcgggaggctgaggcaggagaatggcgtgaacccgggaagcggagcttgcagtgagccgagattgcgccactgcagtccgcagtctggcctgggcgacacagcgagactccgtctcaaaaaaaaaaaaaaaaaaaaaaaaaaagagagctttagcaggataggtgtccccaggtgcagcatatttgaaggactgggttccctcaatttccccccacccctgctccccaccatctgtagccctgaaaggtctcgatccacctgctctctggacggaactgtggcttgaagagccattcctgaggactttggggcctttctctttctagacacccattttcttaattagaaagggaaaagactgtggccttgggagagttaagaatagtaagacaaggagctgggcagtccagtagtcaactagctacatgtagctatttaaattagttacaatgaaataaaattagaaaactgtagagctgcagtcgcaccagcctcattcatagccatgtgtgactggtggctgccgtcttgggtggtgccttcattgtcccagaaagttctgttggagcaagcccagctggaggaacccagcttccctggcacgcctgagggtgacatggtgccctcaccgccttctgtctgtcctcactttctcctgccctgtccctccgccctcaggtgagaagccctttgagtgtaagctctgccaccagcgctcccgggactactcggccatgatcaagcacctgagaacgcacaacggcgcctcgccctaccagtgcaccatctgcacagagtactgccccagcctctcctccatgcagaagcacatgaagggccacaagcccgaggagatcccgcccgactggaggatagagaagacgtacctctacctgtgctatgtgtgaagggaggcccgcggcggtggagccgagcggggagccaggaaagaagagttggagtgagatgaaggaaggactatgacaaataaaaaaggaaaagaaaaaaaaaaacagaaggaaaaggaaacctggtagctttttggccttggattctctctgggctccagatgacctggatgccaagccactgcccctcctctgggggcctccaccctcctctcccggctggaggtttgcctgattttctgggatggggttgggtattttgttcactcaaatggtggcacatttttctccttccttcacccagaccttcttttatgtgtccagaaatggaggctagaaagcaggtgagaggtcctctggtcagagccacacggtctgtgccggccttcctccaccaagacccccaggagatgaagggagggaggaggtgagccagaagggcgctcccctgctgatgggtctgggctgggtcactagctgctcaaaatggcagctctagtttgctggcggctgactggggaggagaagggctctgtttctcttcccaccactcagcccacctgctgctttcctctgctttgccacatctgggtgtcccccggtggtctctgagagcctcaggacccctgcccctcctccagctctttgttcccagcctccccttgactcctgtcctccaagtcccaggggagtcccagcccctcagggacctggcggtgtctccatccttctccggttccctagtgggatagctgcctctgacttcagggtccctcctaccctcagccttctgagaacacaaaacaaatccaataccccaccctagtccagcaccatcgtgagcaagattcctgctgcgctgcttccaaaatggaaaagcatcacaactaaatacctaatatcctaccaaacaaaccacagtccctacgtagccctacttcagtcccaggagaaggaatccatgaatgggctgaggttccgagggtaggttgtggatgtctttctctagaggggtcccacacctggaaaagaggacacccagcccgtgggatgagggaagctgggcaagggagaaagttgttgagtcacactggggaccccagatgtagtgagctcagcaagaaaagccaggtccagagagagtcgcacagaattcctgactcacagcgcccctcggtccacagtggagaggaggaggaggaggagcagaaggagggggaggagctgcaggaggaggaggatttgaaagcgctttggccttgtgttatgttttgcttcttttctgtgtcccctgttagcacattgtacttgaattacctcagttttttgtgacctcatgagctttcttaacctctgtatctctttttcggttggggcttggaggaatggggagggtgttcttttctgtttcttgtgtaaattaatagttgtttttatagacttcagctggtcaagaccctccccgtgcccctggagaccagcctcccagctggcaggaactgtgcaggaggagttgatactcaggatctgaatgtgagggccgaggagggcgaagagcgtgggtggggaggggatgttgctttggggtctcatggtccccagagggcactagggagtcacttttggctccgctggtgcatgaagtcacctgtggccaccatccgttccgcctaaaacactctggagagaatcccacctttcttacaatttgctgggccattgaggtttgagggcctgtgtttggatccttgcaactgtgtggtctcacctctgtgcgtgcattctcattgccagaattggtctattttcacggctggtctttggggaggggggcgggatccagcctttgttttgttgtgttggggtgggggtgttgtttttctaaaagctacctcttatgtttgtccagttgttcttttgttcctttcccgcctcccattctgctgctcttcctccctcttttccccaacctcccccgaccctcctgaattttggaaagcacatttgcaatattcgtgtttgctttgggacggaccctccgtttcatctcatgctttatgtgtaagagttttttattattattttttctttcctttctctctctgagaaagttgtggctgcgttttgatcttaggttttacaaagtggtttagggaagcggttttggggagaaggatcacgaggaatgtagggaagccggagggatgggtgctgctgcgacgacccccccgtccctcggccccagccctcctgccctccccgtcaatctcatccaccaaatctgaaggccttaaaattgtgtgttgggaggatgtgaattgggaggacggtgtcactagactgtggattagggatggtaaagtagggaggatgctattttgcaactatagtaacgacttagtgttttggaaaggaaaagaagttaaacttgaaatacgtgactagaacagttgtcatgtttataatgtgaaaagggtgaaatcatttgggggaggggccgtctgtaagaaatcattatgcactatggcttcctcctctggtctgggaagaagcggggactggctggccctcaggggatctgtaaatcccagaaaacagtatttttaacagcaagatgtcattcaacattggtggggaaggaagagaaaaaaatcaaactattccatagaactagctggccccctcactcccatgcccttcccactcagcctgggcccctccccgctccattcataaaagctgagagggttgagctaatcttcacaaattgtaatatttttgtagtatctgttagttccttcgtcagttctgcagaaccttgccctttccttttgtaatgtgaataggaagacaaaagacaaaaaaaaatccaccaccaccaaaatatccctttgtacatgtatgtgcgtgtgcgcgtgtgctttgtgtgtgtggttgtgtgttaaatcatgcagtattgtcgtaatctggtgttgcagcaatggatggtactaaatcagcacctggatgccccacccaaccccgtgggccctgcagaccccagtagggaggtatggggagagctcaggggagtgtggtttctgagggctactgtctggggacacctctgaacttactgtaccttcctctccccatgaagacacctgaatagagtctaacatgcctcttctccaacttcctacctacaacaacagaacagttctaatgttgcacggcctagtggccagggggcaagctaagaggctgtctggaggctttatatgtgtctggagttaaggggagaggaggagggtagacaggggtctctccccaggtgggatctgaatatctgtcctcccctcttcttcatgccacctgactccttcggccccctggctgcctttagctgtggtactgctgacaaccctgcttgctactgccttatccagcacagtgaaaaacttctccagcctggcaaggccacgttggttaatagtccctttcccatgtccagctcctacaaatatgtcccttaatgcatttggtgacatttacacctcactcatgtgctctttccctattcactccttcactcattcaaagcattaaaatcctatgtatatataggatagacaaatatatagatatatagatatatatatatatagcaagagattgatataaaatagtaaatatcattgctgctttgggctgctttggaggaggaggccatgaatatggggaaggcagatctggggtgcaggggtaggtagggaggctgggggacccagtgattcagtacaatccaagggatgcaacgcgggcttgtttaatctttgtgcctgaacagtttttccatgttgagaaaaaaaagaaaaaaaaactgctgcaatttttcacaagtgtatggtacctttctggatgctattggtacaattgctgtggatggaagagggccattgagcttacctccctataggggagagagcagaggtggggcagcctttcgactctgtccatgacggctggcagggtcagggtagtttctgggcctgcttcccggcaagccgagctagggtgaaaactgggggcgcaccaggatgtgagacagaaaagcagaagatgagactctgttcattcacttttcctaggcccatcctgtggtcatctttccccctcccatcatacctcctccttcctggagcctctgccggcttggctgtaatggtggcacttacctggatatttcagtgggaggatgaaaggcgagactcaccctacgcggtgggacagatggggagaggaaaaaggcagagatggccaggagaggggtgcaggacaaaccagagaggttgggtcaggggaaaagggtggggagaaagaggggtgcaggccctgcaggccggttagccagcagctgcggcctccccgggcccttggcatccaacttcgcagacagggtaccagcctcctggtgtgtatcataggatttgttcacatagtgttatgcatgatcttcgtaaggttaagaagccgtggtggtgcaccatgacatccaacccgtatatataaagataaatatatatatatatgtatgtaaattatagcactgagggccctgctgccctgctggaccaagcaaaactaagccttttggtttgggtattatgtttcgttttgttatttgtttgtttttgtggcttgtcttatgtcgtgatagcacaagtgccagtcggattgctctgtattacagaatagtgtttttaattcatcaatgttctagttaatgtctacctcagcacctcctcttagcctaattttaggaggttgcccaattttgtttcttcaattttactggttacttttttgtacaaatcaatctctttctctctttctctcctccccacctctcacccttgccctctccatctccctctcccgccctcccctcctccctctggctccccgtctcatttctgtccactccattctctctccctctctcctgcctcctgctgccccctccccagcccacttccccgagttgtgcttgccgctccttatctgttctagttccgaagcagtttcactcgaagttgtgcagtcctggttgcagctttccgcatctgccttcgtttcgtgtagattgacgcgtttctttgtaatttcagtgtttctgacaagatttaaaaaaaaaaaaaggaaaaaaaaagaaaaaatgaatttactgctgcaggtttttttctctctccatgtgtcactaagtgaagtttgtgccttctatagcaaagagaatattttttacatcctactaacagtagatttttttgtagtgaacattttttgtatttttatttataagtctcataagaaaaatagcaatgttcagttgtataccttgaatctgcagttagaagagaataaagttaattcagttgtctctcgcttgaagcgtcccacctttttattgaagtacttggttttgttttgtttttttttttgttttttttgccttttcttgtgtggggaacatggtagaggaattaagatttttgtgtggggactgggaaaaagaaagctctgtattacacatatttagacttatctatgtgtcacttttatgccacatttacaaggcacagatgcactgaataacatttttctaatactttttagttaaaaaatgttaaatacgttaatatcgtatgatccttggtacaatgtgctaggtaggcacttgttcacttattcagcaagaccaccatgtaccagttactgttgtcggcgctgggaattacagcaaaggacaaacagacaaaccctggccgccctggggctaccatgctagcgggccgctgagtcggaatccgtggctgtgttaggataacttgctcaggattgcacggctggtgagcagcagtcagaactccatccacctctcctgataccaggccaggttcctttactccagagttctcaaagcaggggtctcacgtcttctttagtctttagagagacattttcaactgactccttagtggctaagcaagcttcagaaatttctcaacaagaagcttccacacaatcaaaggtccctgcctgcgtctgtagcagccaagagctgttaagaaaggagattggagcaggtggccttgtgcaggggaggggatgggtgggaggtggccgtgcaagctctgcattgtcatggacggaataaaggatttccacaacactcaatgggtacgattccctccctgtctcatctccctgtgtctgggccaagccctcttctctggccctttccccgttcctcttatcggggatagaagcatcgccctatctttagctgtaaaaccaaagccactcaatcctagacgtggtgcttcagcacctctgcctgaggccgtcctcactgcctgtctctgaccaaaataacccctctcctcctcaagacccaggggacacagccatgattgtcgtgctgggtcactccggtagggtaaacccacaccgagcatcaggcctggcctccagcatcaccaggagtcgcagggagccatcaccccacgcgccaccgccacccacctggggagccaaacaaggcctggcctgccaggggtggcactgggagggttacctttcagccctgttctcctggggccaagacccgggtctgtctgaccctggggttgctgagcagaaaccgcctggagctacccctaccaccggacaatcttcccaggaggaggaacaggtgcagcctgggggcctccagcccctagaagttgcttctctgtctttgctttctcctctccctctttgccgtctgctgtgctttcttgacccctcctgcccctcatctttttcctctctcccaatcttttttctctcctttccactcctcccctctcttcctcatctgtggtcttttctcctttctttttgcttttgtttctctgtcccaccttattttccctctccacatatttctcatctgggaaaccagtccttaaccaaattctgtgttttgattttgagcagttgccaccattcccccaagccgtcctgatcctggcttttcttgggcccctgcctatttcctcacccccacactctactccaactccccgacacacacacacagacacacacacacagcctcctcgcccctcccccagctcccctcccctccctcaggcctcagctttctcttgacagatgggagggcagtgagcactccctctttaaaacaacatttaatcgccgttttctgttcttggacatcaaagctggggcttaggcgctgtgctggggtcgcggcggcgcgggcgctgggggagaggaggtgagtgaataggggctgggctgaatgggctttgtgtgaccgccagctctgccagctttacatgctctttgacccagatatgatctcatggagagaaaggggccctggccaggccagcctgagaatgctccctccgtggcctgactcaacccctctcctccctgcctggggcaggcggccccactgccgccccctgccagccccggctgccactgccctctgccccaaccctggcaattgtgggcagcctcctccagaacacactcaccaggagggcacattgctggggtcagaagaggggacaggcaccgaggcaggggctgggaggatgccgccgtggggctgcagggtgttctccagggacctcaagcgggagctccccgcatgccctgtagtcctggctgggttcaaggaggcgtttgggtcatttcagccttagcagctctcctcccagtctctctgaggaactcctctcctgaccaaagtggagagctgaggcccggcgccagcagaggtttgctgaagactcaggcaagttgcagcccgtgagaagaggcataagggaagccaaggccaaggccgcctccctccactcagcacggccaggccttcccatgtgggagcccctcacgcccctggcaccaggaagggaggggattggggatctgaagatgactggcctcagtgccctgcttcagcccagaccctctgtcacttccatcctctgctttgcttgctgcccagagcgattttccaaaaatgcaaatagcatcatgtcgctccctagatgagagtccctggtgactcctcagtactctgaggatggaattcaaactccttaacaaagttccaagacaccctgagtgacagagcccctgctcagcacccaacttcgtcttaagatcactcttgagcccctcggccaacccctactctgctccagccgatgggaccacgggtgttctgggccacaccgagctccattcccctgtgggcctgtgcgtgtgctgtttcctcttctgagagctacgcaaacacacacaccccttctgtctggctctctcaacttctcctttttcacttttcagctcaaaccttctctcaggaagccttccctggacccctgaagctaaattaggcatagagtctctatagtaccatttagtcacctgtttccttaactgtcaccattaccagactgtcagttccttgaggtcaggaattgtgtgttatctatctttgtgtttccagagcttcatgctgcctggcacatgataggcacccggtaaatctttgttgtataaatagatgaaagaaagagagggagaaggagggaaacagagaggtaattagcactccagggctcatgttgcagttgtcaggggcacgtgagagcagggaaggaggaacatcacatgcccgctcgggcacctccccaggacacgtgtacacacacgcagaggcccagtgggggggggggagctcctgcatccccacacctgtgctcatgtcgattcatagaccacctgacccgtgtctgccgcatgccagaggaaggagcaggaggcaacagggcagtggtgcttcatagttgggagctgcctgggtgttgctgggcaggatgcggggcaggagaggggctggggggttgcatatgtagacacctggtccttggcccatgggggcaggtccatcccccagctctctgtgtggtttcaggcccagccccgccgccatccccacttccactcgtgggctggcaggagggcaggctcctctccaggctgcgttttctgcacccagggggtgcctcagtgaaagtgaggctcatttaaacctgactctgccgccctgcagccccctgcagcgctaattaccctgtagttctaaactgattgctgtacactaagcttaagccctcctttatttatttactgactacattaatagcaaagccacgctgcgttcagccgctcccaactgtacaccggctggctgcacccgttccctcatgtcttcccagggaggcagggtggagagatgcagcctggcacaaggcccccttacccaccaccctgactgaatctccagggccagacaacatgagaaatcactgacttcatccatacctactctgggacccgatggggctcctcttattctgactctatgacagagtgggaacatacaacacacaacagctcaccaagcagaggggtctgctattcacagcacactcagaatgctgcctttcagccttcacttgtgggatgagacgctgagcgctggcctcattttacagatgggtaaactgaggctgtggctccatagctggtaggtggtatctcaggcatgctgtccatcgcggagatggccgccccacttgtccccacccagccagctttgacaatttctgttgtgtgttcccataacttctaccccttgccacgagaaaggaagcccttccctatgtggaactgaaactgcttttttgctctcagcttttctgcctcattcacctgcttgtccagaatttgctggcaactttgggaatacagcctttccttcattctcagcctttaccaagcaggtctaagtcagaccttcgatgccaatccccacttccctccagcactcacacatccagggatgtctggggagaggaggcccgctccgggctccggtgtggtcaagccctgctggttctcccattctggggtacagaggtgctcataaacactgtccttgcctgcatctctgagtgccctcaaatcccctgaggcagagctgggccctggccttggggcacagcagctctctgaagaccagatgggccccatcagggtgcagcatacggacccacggaaccaagcacccaggctctactctgatgccaaatagcttggtggctgccgtgcggtgcac

SEQ ID NO: 2238 - DNA, 2446 bp, Homo sapiens
ggtctgcagcgctgcgggccctcctcggctctcggcgggaccggcggtgacaccggagctcgccgtgcgctcccggccgctctcgcctcctctattggcccaggaagcccacccagccccgccacgcagagcccagaaggaaagaaagcctcatgcctgagccgaggggagcaccatggatctgacaaaaatgggcatgatccagctgcagaaccctagccaccccacggggctactgtgcaaggccaaccagatgcggctggccgggactttgtgcgatgtggtcatcatggtggacagccaggagttccacgcccaccggacggtgctggcctgcaccagcaagatgtttgagatcctcttccaccgcaatagtcaacactatactttggacttcctctcgccaaagaccttccagcagattctggagtatgcatatacagccacgctgcaagccaaggcggaggacctggatgacctgctgtatgcggccgagatcctggagatcgagtacctggaggaacagtgcctgaagatgctggagaccatccaggcctcagacgacaatgacacggaggccaccatggccgatggcggggccgaggaagaagaggaccgcaaggctcggtacctcaagaacatcttcatctcgaagcattccagcgaggagagtgggtatgccagtgtggctggacagagcctccctgggcccatggtggaccagagcccttcagtctccacttcatttggtctttcagccatgagtcccaccaaggctgcagtggacagtttgatgaccataggacagtctctcctgcagggaactcttcagccacctgcagggcccgaggagccaactctggctgggggtgggcggcaccctggggtggctgaggtgaagacggagatgatgcaggtggatgaggtgcccagccaggacagccctggggcagccgagtccagcatctcaggagggatgggggacaaggttgaggaaagaggcaaagaggggcctgggaccccgactcgaagcagcgtcatcaccagtgctagggagctacactatgggcgagaggagagtgccgagcaggtgccacccccagctgaggctggccaggcccccactggccgacctgagcacccagcacccccgcctgagaagcatctgggcatctactccgtgttgcccaaccacaaggctgacgctgtattgagcatgccgtcttccgtgacctctggcctccacgtgcagcctgccctggctgtctccatggacttcagcacctatggggggctgctgccccagggcttcatccagagggagctgttcagcaagctgggggagctggctgtgggcatgaagtcagagagccggaccatcggagagcagtgcagcgtgtgtggggtcgagcttcctgataacgaggctgtggagcagcacaggaagctgcacagtgggatgaagacgtacgggtgcgagctctgcgggaagcggttcctggatagtttgcggctgagaatgcacttactggctcattcagcgggtgccaaagcctttgtctgtgatcagtgcggtgcacagttttcgaaggaggatgccctggagacacacaggcagacccatactggcactgacatggccgtcttctgtctgctgtgtgggaagcgcttccaggcgcagagcgcactgcagcagcacatggaggtccacgcgggcgtgcgcagctacatctgcagtgagtgcaaccgcaccttccccagccacacggctctcaaacgccacctgcgctcacatacaggcgaccacccctacgagtgtgagttctgtggcagctgcttccgggatgagagcacactcaagagccacaaacgcatccacacgggtgagaaaccctacgagtgcaatggctgtggcaagaagttcagcctcaagcatcagctggagacgcactatagggtgcacacaggtgagaagccctttgagtgtaagctctgccaccagcgctcccgggactactcggccatgatcaagcacctgagaacgcacaacggcgcctcgccctaccagtgcaccatctgcacagagtactgccccagcctctcctccatgcagaagcacatgaagggccacaagcccgaggagatcccgcccgactggaggatagagaagacgtacctctacctgtgctatgtgtgaagggaggcccgcggcggtggagccgagcggggagccaggaaagaagagttggagtgagatgaaggaaggactatgacaaataaaaaaggaaaagaaaaaaaaaaacagaaggaaaaggaaacctggtagctttttggccttggattctctctgggctccagatgacctggatgccaagccactgcccctcctctgggggcctccaccctcctctcccggctggaggtttgcctgattttctgggatggg

SEQ ID NO: 2239 - protein, 663 aa, Homo sapiens
MDLTKMGMIQLQNPSHPTGLLCKANQMRLAGTLCDVVIMVDSQEFHAHRTVLACTSKMFEILFHRNSQHYTLDFLSPKTFQQIYAYTATLQAKAEDLDDLLYAAEIIEYLEEQCLKMLETIQASDDNDTEATMADGGAEEEEDRKARYLKNIFISKHSSEESGYASVAGQSLPGPMVDQSPSVSTSFGLSAMSPTKAAVDSLMTIGQSLLQGTLQPPAGPEEPTLAGGGRHPGVAEVKTEMMQVDEVPSQDSPGAAESSISGGMGDKVEERGKEGPGTPTRSSVITSARELHYGREESAEQVPPPAEAGQAPTGRPEHPAPPPEKHLGIYSVLPNHKADAVLSMPSSVTSGLHVQPAVSMDFSTYGGLLPQGFIQRELFSKLGELAVGMKSESRTIGEQCSVCGVELPDNEAVEQHRKLHSGMKTYGCELCGKRFLDSLRLRMHLLAHSAGAKAFVCDQCGAQFSKEDALETQTHTGTDMAVFCLLCGKRFQAQSALQQHMEVHAGVRSYICSECNRTFPSHTALKRHLRSHTGDHPYECEFCGSCFRDESTLKSHKRIHTGEKPYECNGCGKKFSLKHQLETHYRVHTGEKPFECKLCHQRSRDYSAMIKHLRTHNGDYQCTICTEYCPSLSSMQKHMKGHKPEEIPPDWRIEKTYLYLCYV

SEQ ID NO: 2240 - DNA, 58835 bp, Mus musculus
  misc_feature (1)...(58835): n = A, C, G or T/U
aagtcagagagtagggagacagccctgaaaaagagacaggggctgagtccttgtaaggactctcaagccaggtggtggcggtggcgcaggcctttaatcccagcactggggaggcagaggcaggcagatctctatgagttcgaggccagcctggtgttcgaggccagatcaagttccatgacagccaggactacacagagaaactctgtttctaaaaaaatgaaacaataaagactttgaagtaaatatgcaatctcattgttcatcacagcttcttctgcacaagatggtgactttccaactgcatcctaccctttgtgataaggcatttacctgaatctgtgtggactcaaaaatttccagttcatttcagtgactctctctctccctctctctctctctctctctctctctctgtgtgtgtgtgtgtgtgtgtgtgtgtgtgtgtgtgtaagtaatatatatgttctgttgagctacaatggtgtgtgtgtggtgtgtatggattccagaggtcaacactggccatcttcctcaataactcttctcctttttttgagacagggtctcactgaacttgaagctcaccagctgaactagactagctggcaaatgagtgtggagatccacctgtctctgctctccctgctgcccagtgcagggtacagacacattcttgcacaaccagtttttatgtgtttgtgtgggggggggggaggggggctgagaatctgaacacacgttcccatgcttgcatgacaggagcttttactgtctgaggcatctccccattctccacatagcaagttttcatgtgatttgtgatgcacaattttcccagatttggccattatgaacccaacagggtactttctgatctaagatgtttctaagatagcttgtaaattatcccacacccatcnnnnnnnnnnnnnnnnnnnnnnnnnnnnnnnnnnnnnnnnnnnnnnnnnnnnnnnnnnnnnnnnnnnnnnnnnnnnnnnnnnnnnnnnnnnnnnnnnnnnnnnnnnnnnnnnnnnnnnnnnnnnnnnnnnnnnnnnnnnnnnnnnnnnnnnnnnnnnnnnnnnnnnnnnnnnnnnnnnnnnnnnnnnnnnnnaccgggtttcacctgttgtcttagaaactgcttggagtatgctttgaggagagtgtcaaggactttgtaggacaagaatgagctgagaattgttaagctctaactcatttttaaaaaatattttttattaggtattttcctcatttacatttccaatgctatcccaaaagtcccccataccctccccccacacacactcccttacccacccactccccctttttggccctggcgttcccctgtactggggcatatacagtttgcatgtccaatgggcctctctttgcagtgatggccgactaggccatcttttgatacatatgcagctagagacaagagctccggggtactgttgttccacctatagggttgcagttccctttagctccttggatactttctctagctcctccattggggggccctgtgatccatccaatagctgacagtgagcatccacttatgtgtttgctaggccccagcacagtctcacaagagacagctatatcagggtcctttcagcaaaatcttgctagtgtatgcaatggtgtcagtgtttggaggctgattatgggatggatccctggatatggcagtctctagatggtccatccttttgtctcagctccaaactttgtctctgtaactacttccatgggtgttttgttcccaattctaagaaggggcaacgtgtccacactttggtcttcattcttcttgagtttcatgtgttttgcaaattgtaacttatatcttggttattctaagtttctgggctaatatccacttatcagtgagtacatatcatgtgagttcttttgtgattgggttacctcactcaggataatgccctccaggtccaaccatttgcctaggaatttcataaatttattctttttaatagctgagtagttgagccctggtagggtcaatggtttggagactgtactggctatatttgtgtcaacttgacacagctggagttatcacagagaaaggagcttcagttgaggaaatgcctccatgagatccaattgtaaggcattttctcaattagtgatcaagggggaaaggccccttgtgggtgggaccatctctgggctggtagtcttggttctataagagagcaggctgaggaagccaggtgaggcaagccagtaaagaacatccctccatggcctcggaatcagctcctgcttcctgacctgcttgagttccagtcctgacttcctctggtgatgaacagcagcatggaagtgtaagccgaataaacccttttctctccaacttgcttcttggtcatgatgtttgtgaaggaatagaaacctgactaagacagagaccctggcgagacctgaggcctgttgcgatttcactgttgataatgattcacttacatctcttcactgacatgggggaaggacaggtcacgtgactgtcatgccaggctgggcccagacctcaagggaaggaagggcaatgacaaggaactggaagcctggaagccagagggtccttctatctatctatctatctatctatctatctacctacctacctacctatctatttatggttttttcaagacaggatttccctggctgtcctggaactcactctgttgtagacaaggctggcctcaaactcacagagatccgcctgcctctgctgccccaagtgctagggattaaaggcaaggcttgtgccaccgctgcccatagcctcaaagacttcctccaagactctctttaaccccaaaggatagaatagaactttgtaataaagaaactaatagatgtcacctttatcggttgatcaaagttagcaccctcaagctgggatgagttgataccaggaacctcctgagatcaggagatctatgcacagagaagcacagcttcctggatgtggtgtaccacctcacacccatcagcagaacccaatcacaagggaaagactacacataaagtcaaagtgagagatggtttacaaaatagctgacctgagaccttccaaagtatcacagtcctgaatgtcaaaaaagcatgggagaaccgacatatactgaaggagaccagaagaaaaagtagctttaaggaccaccgtgctgatgggagggaatagggctgcaggttagacatactattacatagactgatgttagatttttcatttccttcctccttcctttgtttcttgcccctccctctatctaatttttatttcgttctttctcccccccccctttttctgtattagggattgaatctttacatgctagtcagctgttctgacagtgaggtataaccccagcttgatggtaaatttcctgatttttaatatggttgtataagaaaagtatcttatcattataaaaacacacaattaaaggattaaatggtgaataggtactgtgattctaacttattaaaaaaataaaagtaaagaatcggtgataaagcaataggagaaaaaacacttaataattgtcttagggttctactgctgtgaacagacaccgtgaccaaggcaactcttataaggacaccatttaattgggctggcttacaggttcagaggttcagtccattatcatcaaggcaggagcatggcagcatccaggtagatatggtgcaggaggagctgagttctacatctacatctgaaggccgctagcagaatactgacctccaggtagctagggtgaaggccttaaagcccacatccacagtaacacacctactccaacaagggcacaccctctaatagtgccactccctgggccgagcatatacaaaaaacagtaatttggggtagacagaagaggactttttataattttcctctaggcttaaagttatattttataattaaaattcaaattccacaggacctaaagccttcctctggcctttgcaggcactgcatgtacatgatgcacagtcaggcacatacacacacatgtaattaaaataaaccagaatcttaaaggaaaataattccgaagtaaaaatttgcaaagagaacatgaaaaaatatctcttataagaaccttgaaaggggtgctttgatggtgggctttgaaaggaactggcaggaccgagaacaacattagtctggaaaggtgacctgtgctgggcctgacgaaagctatttctgctctggcttgtagctgctttcaggagtctgctgtttgagagtcacaggagtgaagcttttccagagcccatgtgaatggggctggtgatattaacattaccatgtctaaggtccttgagggctgctgcctactgagaaggggcctacgttcgtgttatcaaacaccagtgtgggcacattatacactttttgcttaagttttgggaaaaccctgccaaacccatgaacattgactctcagtcaggtaaggcaggagttctttggttcaatttagagctggtccccttcccaagctccagccctagggcatgcctgggtctgcccattctgtcctgggcatatgttcttcctgttgccccatttgatgcttagcttatcgatcctacgactcagtcaagactgagggcaaaaatcccccacctctgaatcttgcgtttcactgacaattagacaactgggctttgtcttacggtgaactgactattttctaaccaaattaaaatagagccaactgaagagaggatgctgagcaagtgtatcagagctcttccaagaaagaacaggctagaactgtagtacagtattagaacagactacatggggtggtggtgatagctagttagcctttccttccctgatgagcaactcagatcagctgatgttgggcctcagttccctcatctgtgaaatggaacaaatgtgaagaaaatggctggagttctgccccagggctaaaagtctggaacctaacatctggaacctaggctgggacatggtctcctgatgtctcactgctgagaacctcaagtgatttttatctgcctactagagagctgggggcaggagagtcttgggatccacatttctctctcctgtctgctttctagggtgccagctgccagggagccactttgcacacctctgtcggctttcacgaaccctaatgactgacagtgcttggaaatcagccatactctctgcagctgcaagtgagggcatctggagactcagaggggctgtgagccttacttttgcactggtgtccccaaggcaaactgaagcccagtactgatatcacagactgaaggccaagggtcacatcctctacctcactgaagaccctggggcagcagctccatctaagagcccaccccctcagcatgacccttggcctcgtcaccggcctctcagctgggactcccttattcctcatttctgcccctgcctaggccctggctccttgacaccaggtcacagtgagaatgaaagaccacttttgacaaagtgactctcacaagctgactgacctttctaagcctccattttcttctctgtggggtaggatgagagaggcctcacagagtatgggacatgctgagctccaggcctaatgtgtgagagctcggtgggccatcctgttactgctgaacttttggctcacctggtctcgttaattagatccctgctttcagtctgtaggcttctggcttactcctcaacatagttgctctatcctcgtgcattctgctgtctcacaataagcatcatttctattgtttgtgtccccagacaggaagactccatttatttcaccaggtatactggaatggttcttgctttcatgctggagcaggccagagggtacccagaacatagaacatgggccttgggctaactaggataccataggcatcacccctgggaacagtggaccacctgggtcagccataggcagcataccgatccgaggatcaaacagcctatcaggagtatcctgctggctacagcctactggcatttgaaggatgctctaccaggacagaggctcccttccctccctccaagagttgcattatcaaggcagcataaacactaaaagggataaaatgagtgccattaccaaattaaattagggcaggagttttcagagcctccttcttgctagttcccccaacccccaaggttccaagctcttgcctcagacttcccctctagcctggcatcagcttcaccagtgagggcagcctccatgacagtgtcccctcctcaagcccctgagttcctccacactcatataagtcaacgtcagtcctgcctgcgttctgtctatccagtccatctcttggctttcctgaggagatgacaattgaagagaagtaggtatctgggccaaggttgaggctagggaggggcaagaagaacttcccaagcagaggagagaggttggaaaaaaaaaggacctgaaatacaagagagtgaggcaacatgacaaaatcaaagtccagtgggtggcaagtattgaagagtcggctgggttaggccgtgcaggatctgcaggatgtgtaatgacaatggccagcagcctgagaacaacatccatcactcagaaaagtagtagccagaaggtggctagatcagcatctgaaggcatcgctctgctacatggagagcagctggcagtgagcacagatagcttcgctgatgtacagacacagctgcacggagccctgatgctcagagctgagcctgtccaggctctgatgctccaaagttgctgtcttgaaattccaaataacatgctattattgttgggcatggtaatgcatacttttaatcccacatttgggagttagaggcaggtggatctctatgagttcaagaccaatctggtctacagatcaagttccagaaaagccagcgttaatatagagagaaatcctgtcttgaatatatcttcgtatacatgttttaaatgatagttaattaatcatatataggggtgtgtgttatatgagagtgcaatcacatgccatagaacaactgtggaagtcagagggtgttttatgatagaaggttctctcattctaccattggatcctggggattaaactcaagttatctggtttagtgtcacacatctttatcagctgaaccatcttgctaatctttgtgtgattcaagagcaatctcgtatgacagtgacacatacttcatgtggtagcctctcactgcttcccttgggctactcctctgcccctccctccctactccttcctaggtcccctctgcctgcagcaggaatccagctgcaggtttctaaagaagtcaaggttaggaccatgcccaatagcatcttagggtgaggcatggcggctgtccctggctcagactgataacaaatgacatattcggcagacatacttctgtcccatgtacctagtacatcctagcttgtttgcaacacccttggggattgcctgtctatcacaggctgaggagtctgatcatgataaatggagatgcctggctcaactcccctgtccccagcagaacacaggccaatctggtacctggcagaaaaactcagaacttaatagattttggcacttgttccacaaatattcatgcaactgtaaatagtaagtaaaaaccccataggtagaataaaccccaaatgcctaccattggcaatgtttctgttgcttacctggtttaaaggcacagacaaactgactttaaaacccaagtcctaccaggtggctagctgtggcaaccaaggctgtaacaactgattttgcaatttattttcagtccttaagcctatgacctcttgaattcttcaaacatatatattcaaatactatgtcaaacactctgtcctggcctgggtgaggttctccctcatagtgtggcctggggcacagctgcctagacatcaaggcaaattatgttctgaggcagcagaaacagtgattaaagagctgtgattttttttcaggcacagattcccctccctgaggactgggtttggtgtgggcaatggctggggagggagggaagctcgctaacacacagttccatcttctgaggcttcttgaacgtctccatccagtcctatcttccctctgtctcctctacactccacagcttccctcggccttcctggtagcaccatccaggcctctaaccgtccttgcaactctctccccaccccctcttcatttacctccttctcatcacaacactgtcttctggttccactcgataaggagagatctttctggaacttgcctgtaattccattagggtagaaaccagatctgcctcctctcctggcagacctgtcaccagcattctttgtggctctaagctgaggaggggggggtctcatggtcactgtaactttctccagcatctatgacagccccaagggtctgctgtgatggtgatgatgctgaagtaccatctattcttagccaatgagataccagggaagatctcccaagaggctgacgaacaggactttggagaagacaacttgggttttccctttcttcttttgatgtggctgcatctggaggtgtagactctgggggtggggtgggggctggactcacccagcagactgaagggaagagattcctggagaggtcagcagggaccccagcttgggcttttcctgtcagttaaaacaaggctcctggtaacaaaggactctggtctgctttctgatttcaaggtttcatcccattttacagatggagatgttgagttggccaatctgtaacaataaaagtagcttcagcagagggcctgtagggttaaggtaacttacaccacgtggttatgagtgactggtgttcttctaaaggatcagagttcgattcctagcacctacattaggcagctccaaaggattggatgccctcctctagcctctacaggcatctgtacatacctagcacacacacatatcacgcaaataaaaattagaaatgaatctctttttaaaagatgctcattagctcaagccccgggattctagagagaagggcttccagcagcaggcctgctgtgcttcttcttgggggtgtttagggaagcctgggtgtgcctctctttaagccctggcacgtgtaacccacacttgggaactcagctgtctgatcaacccagttggtcctaaggtaagcctcggtaagggtggtgatttgtggacagtctctgactcattcttttcaccagcccaccccgggctcaggactccagaggcctcttctgctgagtgggcaaaccctgtctggaaagggttccccaggacctgcttgccctacaaagagaaattccagaggcattcttgatacgaaacactttcccagagactggaagtgacagatggggaggctgaggctctgagttaggtcaatcaaggtccgtccactagtgaagggcagaatccaaactaaacaaaagctgagcctgagtctccagactcctgtctccctctatcacagttatgaactgaagatggaatgggtgaagatttgcacggggtcaaggacccgtgcctcatcacactgaggtcccttagctagttaccttctcaaaacaagtctccactctcatagccccgggaccaggaccgcaattgagtccgccccgtgctgtgagcaacttgagggtaggacctagtctagggcatgaactgctaaagttggaatgaatggtggacgtccttttccggggtgagaccctaagaacctaacctcttggggccggcgagagtaacagtcatgagattcctaacttgttagttctaaagctaaactgggccaggacttgagcaggcagcagggtggcaggtggcaggcggggctggggctgtgcaggagaaactcagcagctcaacttcctgtgggttagagccctgcgcctgccctgggggaggttgcacaaaccttcctgtgccggcctcaggctgcctgcctgcctgcctggcctgtgcacatccttcctctctcccagcctctgcctgccacctgggctgcctgccctgggcctcagcctgcgtcctcctccatcagtggggctggcgagagcctaggctggaaatcgtggcccacccttccatcactgggcagggctccttcctcatttcgctgctgattctagccccaaacaaaacaggttgagcctttttcctcctccggcagttgcctctggcttgtggctgccttctgagcgtttcagacggcgccggctgggagtgggagggagggcctgggctagccgcgctgggactgggacgtgctcctggctcctggcccatgttcagccctgcttgaagcaggagtgctagcatttgacacaacagacgcccttggaggatgatggcccagctgcagttccgagatgccttctgggtgagtggagtcgactgggggcggtgagcttgccgaacaggtccagccaggcaggaatcaccttggagactgacataggggtacagtttccccataaaaattgtgccttgactttggtcttaattatcatggaggtggcctgggccacagtctctactgacatgaaaggcaaaagaggggccctggctaagataatgaatttctctcacagacatcacccccacagccagagggatggcctcaggctgtttctcctcaggggcatgctgccccagcggcagagctcaccaggacagcctaatggaggatttgaggaggatacatagggaggagtgtacaagggagaagtcagcagcccagacaccagaccaactttagtttggttcgggtctcagctttgtaagggctgggtcggttgctgtttctctctgggcctcagtttctacatctgtataatggagataagtacagatatttgacaactgaaggtgatccaatgcagtaaagccctggtgccttgccagagttaaaactctctttcacccagtctctgatctctgcatacctcaggttcatgaacaaggcagctgggctaggcaacttcctgcctgctgtttcaaattcagggcaggtgtaaaacaaatctttttgccggtgagatgaggaaacctagccaggagggcagtagaggccacagcgcttgcccagctctcctgattttccacttttccctcagcttcccctagtctcctccacccctgactgtcccttggagacacaaggctgagaccttttggttaaagctggggatgtctttctcctgaggataactctccaacaccacaggggactctcaggaccttttactcacccagggcccactcctaaggtcaaagccaggaggatgagggttagtaagccaccttccttcctctctggccagctttgcttggggtctgtgctaaagtatgagtggccttcctcccttgaaactgacttcacagaggacagagggccttgcctggagagggcaccttgtacctgtctgggcctcagttttcctgtgtttacagagaagagtgtaggaccagtccagagctgcagatgaaagcagctgctttggccatctcattcaccggggtgctcattgctcaaggtgacagccagaatccaatcgatgctctgacttagagccctgcaacccaggaaggccagaaaccctggtccattttatccctagtgtctcaatcccaatcccaaatgtctggcctcaacttccccagatcaaagccaagaaaagcagcagcccagtggcaggggccaggcaaaaggatgacatataagacatcagggcgtggtggcagcagtaggacccagcttccccggggctgcttcctaggtaatgtctcgccatgccctgtactggctacacctctggactgctgctggcatcctgggcttctcttcacagtggctcccagggccttggttaggagaagcttcccagggaaggcagagcagagacaaggaggaagtggacagtgggacccattcaactgcctttgaatcctgcagcctggcagtaaatagtcttaggcctagagcggtggcaaatgcctgcaatctcagcttaggcagagagaagagagccaaagtaagttgaaataaagcaggccttgtctgcatggtaagagcttgtctcaagtgacagggagaggcagtgggtgtagttatggagaaaggaagaaaaggaaaggatatccagtcttttttttttaatgaaattttatttatttttattttatgtatttgggtattttgcctgcatgtgtctgtgcattgtgtgcatgcaatgcctgtggaggccagaagagggcgtcatatcctctagaactgtaggtacagatggtggtgagccaccacgttatgtgaggaattaaacccaggtcctctggaagagcagctaatgttcttaactgttaagccatctctctagccccaacatctagattttaaatagtagaaggaaacctctgagctggatggaacagatcatttatctggcaactttgtctatcctgaacacaggtgggaaccagccagatttctaacatcagttcataagcaggagggaaacaaaggtgtcctggaactaaagactccgttactaagagctatccccagagctcattcatatgcttataggagatacccgagagccgcgtgttgtgagcatgtgtgtgtgtaaggatttgtgtaagtgtggacatggatgtgtgccatggtgtgtgtagatcagagggtggctcctgggtgagactccctttcgcttgttttgagacagggtcttctgtttgcttctgtgtgcacttggctatctatcggcgcttgagttcccaggaattctcctgtctctcactccagtgctgcttcagggactctgggattatagacaggagctgcacctgattttatgtgggttcttggattcagagttgagtctttctactcacatgcaaagtgctttacccgctagctatctccccagtcctaccccaagattttaacaggccgtgcaaagtttattgacccacaatttgaacaagtagcatagaggactatcctcccagacaaaaaaacgccaccatctacgagttcagcaggggccgtttgctgggcttgctgctattggctgtctttttgcctcacctgagtagccagctgacctccctcccagctgtctgcaattttgccctaattacacgtggccttgcctcaggttcagggaaggactaggtgagaggttcctcctgtgaagctctgggggagattagcatccgtgtgtggagtaagtacagacctcctatgggctgctttaaggtcatctgtgctccttcccataaccccccactcattgctcagtaagtaaactcagtggttccccaccatggtcttaagtggaatcgtacatcagtttatcattgggaccatggaggagagggtagatctttatgcctccatctagggaaggagttttagcaacaagtgtgtccatggggtcctgtagatacagccattcgtaggggcctgtctggggctatagatataaatgttgatgaactggacctaatagaggcattctccctggatagctaaggagacaaagaagttatagaaaacagatatgataggctggacatgatggtacccacctttaatccagaatttcaaaggtggaggcaggagaatagtaagtttagaacagcctgggctacaaaggaagctatagactagccagagatgtatagcaaggccctgtctcaagtcctttctcccagcaaaagcagataagatgacttagaagtagtgggacgttgagcacgggactagctgtagtcctgtccctttttagccttgtattgaagtctgtccgtacagctacacagtgtggatggcctgattctggctgtgcagaacatttccaaggctggctgtcatgggagtgagtttgggtggctggccacagtggatagaaaggaagagtttgtttccgtgacacagacattgacaaggagcattgtagatttgctggtaatttgtggctaggctgaagagcaggacctgttatgtgagaccagtctgaggccgagaatagcaggcttcccccgctgagaacctgcttagcgctgggtcacaagttataagaaagcccaggccaccacagccccagatgccagtggcctcgaatggcccatggtccatttgtcttcctgacctcatttccccttggtttcatattcttctctctctctctctctctttctctctctctctctctctctctctctctctctgtgtgtgtgtgtgtgtgtgtgtgtgtgtgtgtgtgtgtgaaaatcacattttaatttgtaggagggcacattcccccacggcatgccaatgtagctcaaaggacatctttcaggagtcatttctcttccttctaccatggggatcctggggattgaactcaggtcaccaggcttggcagcaggcacccttacccattgaaccatcttgccagcccctaccgggttttctagtggcgttctgtgccagaagctctaaaatggacccttgaattttattctcagacctatctaataagactatcctgccttcaaggatagttcagtaggagaactcaagggactcccaaatgactgggctaggcaaagtatgcacttgaagagccgtggccaagtactaccgtcccaccctggtctctgctggctgggacttgtacagccaatggcctttgctgaggaattccagagtattgttttaagagggaaaatcatttctgggttagactttcatgagatccatcagatctctttggggatagttggaaggaaaaatcgatgttggaagaggttgtggcccatgtgctggcacggccttcacgtcttgtttgggagttaagggatatgactgagcgtctccctctagtacacggtcagatctcatcctttaaggctgggcctgccccttccctgtgtgtccccttagctgctggtgcctcttccccttcccagtcccgagactctgattttccccatttaggctgagagaagaaacctgagggggccttgcaccagcatgtcccaaagccacttgccctctcttgtagaacctgtctactgtagtgccaagagagtttgccacttgccacgctgttgaaagtctgccttgggctgtcaaagccacaaatatgtcttctataagaaaaaatatattaatataaaacccagagaggaaagtggggaaatggagaaaaaattagggaagagtttccttatattgcataacataaataataatatcttgccatatatgattagtttacataggcacgtgcatactatgtgcaaattttatattctctctttttatgtttctactatttaaacttctattttaagttgtggcaaaatacacatatcataaaatacatcatttggatacttgcctcttggatacattcagttgaatttgttcttggatgtttgtataaaaccactgagacaaaaactcaagatgttgcattacataacaggaagttgttctaatatcacagcaaaggggactgcaaagcactatttccagatctactgtgccgtgcagttggccaaatatgaatcaaggatagcacaatctactcatttcagagtctgaaattttcttcatgatgatgtacttgggagactgaggcaggattgtgagtttgacttgtatggactacataaggagcctgagtccagtttggactgcacagtgagtcctgtctcaaaacgataaaaccgagaggacatgaagcaaaagtttctatcattgcagctagtctgagcatgcaggagccaatggcaggctgtcacacacagcccagggactacagggactggtggagccaggctgaactatacatggtaaggctgacagtgaaatctgggcctactggttgtcaacaaactagctggctggtgggtggtagccatggcaccaaaaggctgcatttctctctagggattggaccaacagacagggcagggataaatcttcaactgaccccatatatttatcatcttaactctccttttccccatcttaaccatttttaagttgtacagttcagttgtgtctgaaagaaacctctgctttaaggtgtaagtggatctggtcggttccctggtgttgttatgaacagcaactttaagacctcgaaaggtcctctggctagaatagggacctttttactgctgcagggacaatccaagtggcttgggagggcctgagcctgtgggcaacgaaacagagccatctcagctttgaggaaggacttggagcattgtgggacttcattcttaggctcaaggggtcaggggctccacatgggccagtgactaggaagcaacaggggcttgtcaagagggcaagagatgaacccggaggctctgggtgtcttagccttggctgctcccagccaccttccacagcttcctccctgtgatgtgagggggatggggatggatcctctgaacaggtttgtacgatgtgtggcaagttggggatctgcagacaccagcatcagctccttttcccaacaagagtctctggaaagctccacagggtgaatgaaagaggtaggctgttggcagggtaagaggaaagaaactagtgagggatagggccaggtggccctatatataaacacggctatcattgagttctgaaccatgtcagcctaacagtcgacgaattaaacaaatcaaaataaaaaagagaacatttgcttcaagatccatgaagatttttcttggtcttggctccttaagacacccccagaagaacatggcagcacttctttgtgctagcatcaggatcgcccaattatagccggcaaggagctagccagtggtgtcctggcttcaggtagctccgaggcacaagcagctcaatgcacatccaagaacagcttggttggattataatcttcgtggggtggtctgcccagtccctggctgggttggcactggtttctgtgggtttgggagagatggactttccctgctttttcttattccaatagagtaaggggtgtgtttaatctttgcaattaaatatagatcacatacatcatttaaaaaaaaaaaaaaaggagaccgttttttttaaacaaaaccaagtgagtctactttcaaggccagaaggtatttttaggtcaagtttgtggtctgatagcactaccccttccacaggctgtgcatgagagtggccagacaccaaaatcttggcaccactatgtccattctactggcatggtatgataggagattgcagagatttgtggctgnnnnnnnnnnnnnnnnnnnnnnnnnnnnnnnnnnnnnnnnnnnnnnnnnnnnnnnnnnnnnnnnnnnnnnnnnnnnnnnnnnnnnnnnnnnnnnnnnnnnnnnnnnnnnnnnnnnnnnnnnnnnnnnnnnnnnnnnnnnnnnnnnnnnnnnnnnnnnnnnnnnnnnnnnnnnnnnnnnnnnctttcctttcctttcctttcctttcctttcctttcctttcctttcctttcctttcctttcctttttttctttcctttttaatttacagaggtccacctgcctcatcttcaccaccaagtggctgtgatgccagtctgttgtcactcaaggatatactggctgcaggatccaccctctgtggaaagtgtgagattctccatggccccctttgcactttagactccaaaacctcaaacatttctcaggttcttctggcctctgcatagagctagaacagttcctggggtggggtggggtgcatctgggagctaggagggcagagcagaggtgtggaaaggggacccggcatagctgatgttgtgcaaagccctgtaggaagggaagccccggctggattgtgaaaggcttctatccctatggctggtatatacacttccttctgccttttctgaccctttcctgtggtggctgcaggctacagttggactaccctccacctcaccggaggtgcctgacatcacaaagcatttgagggaaggggcttgctgaaaatgctgaagtggggaagccaaaaatgccttgacagagcacctacactaaggctaccctgagtaatggctgtgaaggccactccctcatgggccttgttgtttaccaagggaacaggcttccttgatggcttgcctggtttcactctcactttctgggtaagcttggaggtagtagtttccctttctgggccctacttttcttatctattttagagtcatgagtcaccatcacctagaaactggcttggaggaagaggaggctccaggcagtggtcactgaccatcgctggctcatcttaggagctgggccagcatgggtctcaagggaaatttataactgaatatgtgtctctcgaacatgtctttctagaatatttctttaactatgtccaaaatgacattccaccaccagagagttatctctttggttttaaatcacaagatgacccatgtcatctccctctattacactaatggtcccatgactttgctattcttttcttttaatcttcagtcaggcacagtgggggatagggaatgaaggggggtgtggcacatcactataatccaagcagtgaggagtctaaggtaggagaatcgtgagttcaagactagcctggacaatagagcaagattctgtctttttaaaaaaaaaaatgtgttagctgatacataagaaccgagttggggaaatggtccattggaaaggcacttgctgtgcaagcatgagaacctgagttcggatccccaggaccgacggggaaagccagacagcatccataaccaccatatggggaagctgcagacagctggatccctgaagctcattggtcagccagcctgagtgaattggtttcagctccaagttcagtgagagacctgtcgcaaaaattaattaattagttagttagttaattaataaaaacagtaaggtaaagaacaacagagggagtcccctaaaagctgacttttgacctccacatacagaaaaatgtgcccaaaagtacatatactacacacacacacacacacacacacacacacacacacacacacacatgaactgcacatgttaatggatatcttgaaaaagtttgataacgtgttgtatccacttctttaaattctatcatttcttcattgtgaagacttccaaattgttattttcagcttttcggaacaagtgtgcaaaattgttaagagtctggtgttcctagttcaacttcacacagaggaaacagggatgatggaggaaaaatggccttaggagcttggacccaggtggggcttgtcttcctctagaattagagaagcccttgggattctgggatgatttttgctgaggccttgcatcctgggcaatgggtaatggagcatataggcaggccagtcaccattaggtgagagcaagtagctgcccccgtgtgaggatggagccccaggtgggacccagggcttctcattcctgtagcaatgggaatgagaaatggaaccatgccgaggtggaagaaagtaatggtttgtggcaggtagtcacttgccatgttcaaagggaccacaaggaggcctgtttggccagaaggaaagactgaggcaccagaggagataaggtcagagctggagcaggaccagagctctcagaaccccgtgtctggctgcagaccaattaagtcaaattttctgggggaggagtcggccttaagcctctggagaatatagctctggtgatgcgtcctggtactgatggggctcactcagcctttatcatttgcttggcttccttggctcatctgagaagtgggtgagtttgaaggtttggagtatgtgtgctgggtttttgtgtatatgtagcataaaatttactattttaccagtgttaagcgtgtcagtcagtggtatttagcacactccctgtttctagaactgtttattgtctgaacagaaactactccccttgaatgataaaattccttcccttcctgctcaaggtttgccttccagggctgtgacataatacctgaggaaccagcttatgaagagggaaggtttcatgtttcaaacagttacttggtcccactgcattagccggtagtgaagcagggcatcattggagccaagctgtttgcctcatggcaacaggaaggaaggcagggaggattgtgggagaggggtgtagggaaagaggaagacagaagggaagaaggaagtggaagggaaggagagatagcaagagatgaggtcggggaggaaacctgggccccagtactttcctcaaaagcaggtccctaatgatgtaacttcctttctttacgcttctaaaggctctgccactctgcctagagccacaggcaggcagccaagccttgacttgtaggactttgaaagatactctctcctcaccccgttctgcttgtgtgagcattgaggtgagggtggggaagcggtctgggtattgaacctaaggctatgcatatacaaagcagggactctcacctggcctctggctctgtccatttgttggttacatttgcattcgctggtttgttggttgacaggtgtctatatagcccaggctgccctcatacgcggctgtacgcttttagagtgacgcagttgcagctgtgtgtgtgagacattcagctctactgtctgcctctatgaatttgaccagtccaggtacccacagtagagtctcgctgcatttattgtcctctggttcaatagacttgaaaagcatttttgaggctcattcacactgtagtatctgtcaagaattttctcttcgtgtgtgcatgttccatcaactcattggtctggagtctcagaaaatgaccgcatcttggtaaggcgggagagttttagttctgcaggaattgagcaggcaagctcacccacagtgtatcctgcagggttttcattcctaaagcaaaggggtcctgtgcctcgctctgagtggtctgagctcgggctcacactctcataggactcactgatttagaacaaagcagctataagcataatacttttttttaaagcagaaaatgcaactttgatcgcttattttgatttcaggaagtgctggcctggagaaatttgaaaggataaaatttttttttcatggaattttgttttatttgaccactttacagaaaagacagcaccatttctttataactgaggcagagagtgagtgagcttatgcccagactgtgcagtcattcatcagcagacacttggctgtcttcctttcggttgtcatgattaannnnnnnnnnnnnnnnnnnnnnnnnnnnnnnnnnnnnnnnnnnnnnnnnnnnnnnnnnnnnnnnnnnnnnnnnnnnnnnnnnnnnnnnnnnnnnnnnnnnnnnnnnnnnnnnnnnnnnnnnnnnnnnnnnnnnnnnnnnnnnnnnnnnnnnnnnnnnnnnnnnnnnnnnnnnnnnnnnnnnnnnnnnnnnnnnnnnnnnnnnnnnnnnnnnnnnnnnnnnnnnnnnnnnnnnnnnnnnnnnnnnnnnnnnnnnnnnnnnnnnnnnnnnnnnnnnnnnnnnnnnnnnnnnnnnnnnnnnnnnnnnnnnncataagcagttttgcactgtggtttgatttgcatttccctgacaactaatggtgtggagctcctcctgtgtttgctggccactgggatatcttcttcagagacatgtccattcaatccctttgcctgtctttgaaccatgtcattgtcttctgggtgaattctctctgtagtctatagatgctcactctttaacaggtatgtgatttttcaaatcgtgcattctgtttcgtaagttgtctttttactccctcaatgttgtcctttgatgcacaagcacattttactcattttattcaagcccaccctacccggttttttgtttgtcagttagtttgtttgtgttgtcatgtcacattcaagatgacactggcaaattctgtgttaggctgctttcctcttctcttttctttttggatctttatagctttagatcttacatttgtgccgtgacagattttgcattgatttttgtcacatggtataaggtaagggtctgtttccatttcctttacacgtgtatatctagctttcccagcagtatttgtgaaaaagattgtcatttcccaactgaatgttcttggcacccatgaaaaaatcagtcgaccagggtctggagacatgttccatggttaagggtactttctgctcccccagaggacctgcatccatgacaggcatctcataaccacccttaattccagctccaaggaacctcacgccccctgctgtcctctgagaggacctgcacgcatgtgacatacacacacacatccatacacacacacacacacacacacacacacacacacaaaaaaaatttattcctggactctttttaatgtgtatggagtgccatacacattaaaaactgagaggccaaaggaagccattggatcccctagaactggagttaggaatggttgtgagctaccaggctgggcatcgagccgtcttctagaagaacagccagtgctcttaaccactgaccaatctctccaggccctatttctgggccgtttgctctattccgttgttctatgggtctgcctttgagccagtaccacagtttttattactgtagctctataaaatttggaatcaaaaagtatcttcaaactttgttctttttcaagatggttttggcaggttgggtctttagtagtgtggttttgttctcatttaatagataaggaaattgaggtctgggccttcttttggttaccttgtgtggcctggcttccctactcataagttcctgctacatctctacctgtgggtactatgaagtcccccatagtggttggctcttcctgttgatgtcctacctctgactctttggcaggctcttaatgtccagccctctttcaggctccacatactcccaacattcttcaaggagggtctggaggaagcttggcagcccaggtcgctgcctcctttatggactgtggtaggctttgctgggaatcgatatcaccatgactgctgcctgcctgacctgcggtgtctgtgaaaatgtgcctttctgacctctgctttttcggaccacagcctctgaagcaaatgatgttcccttctaggtagcttgtcaaaacctgtccttggaccagctcaggactgttctccaggcacagggtctccagaccacagaggataggaaggctcggaaggttaactgaagacagttcaagcaagaaaatgtagggatggtatgcgggggtgaggtgagcaggggggttctcatcaaacttagaccatgcctgtccctggagctgcatggcaatggaatcgagtgggaggggcataggtggagctgtcacaccttggtgtggcatcaaaggaagtattgtgtcagaaggtgcctgtggtgactcttgatttgattcagcaaagagtggaaactgagcctagagtccaagaactgagtgtggatcaggactggagctgggaggcaggattgcccactaacctgtgggaatttcatcccagcctccacataattcccagctctagaggaaagaatgtatattcacaaactgaggtgaaacttgtgtgtgtgtgtgtgcgtgcgtgcatgtgtgtgtgtgtgtgtgtgtgtgtgtgtgtgtgtgcgcgcgcgcgcgcgcgtgtgtgtgttacagcttactgattagactaagctggctggctagccagctactgggattcaccagtctccagttccccagtgcttggattacaagtgcgctttaccaatggatctgtcagatagtaaatgcacaggcactctcagcctgcccagcttcctgggacccaggggaagaaagctcttgctgcttagagccaaattttcccagggtgtggctctatgcaaatgctcggttagtggctgtgtttggcagggctaaagaatgccctattctgacatgggtccttttcttagtgggtgctatcttttttctcttactcttaccttagaacccaagaatctactatgttcatgagtggtcctgtgagtccttgtctagaaaagatatggtatacattaactgctatggatagaagcttgagactgacagactcacaaaccttaaggacaaggaatctcacgcgcacacacactgaagtacaaagcctggctaacactgagccctggaaacagctcagccagaacagggggccactcttgagtccagaccctactgaggctgcagaagaacctttctccagagggagtgggacaggaatggactcccctacaaggccagtggctcatttctgtcttttgagaaaatccaatccccaccacaattcgcagccacagagcaggctagcccacatcagcctgcagagcacaaggtatatgtattcacctcagtttccaaatggaaacactgagatgcagagaagtgtcacagtgaggctccaaccccagttctccttttcaatttcctttctgtttgtcctttagtcaatatgtgctaaccacaacaggcgccattttcgagaagcagcccgctgagtgtatagcctccttcatgagtcatttcactgggttctctgaatccctggcagggatgtttaccctactttacacaggcagtggtctcagctccaggggttaagtgacaagcccaaggtcacgtaggtgttagtgggacttagcagactcagaacccagtgatcagcacttctgtgtccattgcaggacctcctctcaggccagtgctcttctgagacagcctctggtaggaaagggaggggccgtgatacctggggatggcatctccagagacaatgtctcagcctttggtgcctggttctaggtggaaaagtccctcataggctatagaaagggacccagtgtggaccggttaagagcatgcatgccacaagcagcatctgtccttcctttgaagacagccgggacccttcaggtttgctgtagggtctgtgtccattcctagtctcagggccatcaggggaggcatcattcctgcttctccgacgcccccaccacttcttgattgactcaccccccccctcccaaggcatctgcctcctacactgctgtccctccgccagaccctggtgagctctggagtgaccatcaatcatggcagggccagctccccacagatcattagccttgatgaccctcagcgccaccacacagtgagagaggcagtcacaaactaacattgcaagctctatgaggactaggagggatcctgtggctagagcacctgactcatgctggtctgtacacacacacacacacacacacacccgcactggcttccttccgaatttagaatttgcctctttctttcgtgttctctggaatgatttgatccttcagtttgcctgatgtgattctgctctgaccagctgtgaactacttctttagactctattgcctctgtctgtccctgtcctccttccttcttctccacttcctccccccctcctcctcctccttctcatcctctttctcctcttcctcctcctccctctctccgttggctgctaccttgaaagtggatataagaatagacttctctacccaaaggattcatttccatcttgccctctacctgcgcagttgttctctccccagtgcacccccctgtccctccaccccccccatttctaacattctggtttcgtaaatcaggagacagaaacagcggtcaagttgaccctttagacaaggcagagtaggtagggcaccgcagcacctcacagaacggtctctcaaggaccatgcaggcctgactcgctgtaaaagggactgttataaggcaaaccgctaccttccattcctcacaactgagacccattcggtttggtttgggacagggtctcatatgtagccctggctgttttggaacttgctatgtaaaccaggctgaccttgaatgcaagagatctgtttatttctgcctctcaaatgctgaaattaaaggcgtatgtcacgctggccatggaggcctatttgaaagcaaaaagcttgtcgatcagctagtccttattcaaaagtaggtatgctcacccaatagtgcagcccccttcacacccacttcccacctcaggaccactccacaccctgtgttcggtgtgactgagttcatgcacagcaggcccacctccacactcacatctcctcaggtaatggttcctgaacaggcctgaaaactcgaagtgctctctctcctttgaggtcctgaggctgcaggtcagccacagccctatggctcccctgtagtttagagtgtagtgtggacccacccactatcctgacaggttagtgaagccaaggaacgtccctgcaaggccacaggaggccatcagactgcaacttggtgggagcttctggtaacttctttctagctttaagctttagttagcccaactggacacagaataactctctccttaaggagagcaatagcttattcttaagccaaatatgaatgactctggccccaggccaagttgctccaaaagatatggcccatgtggaagtgttttgcacttcaaacagtgttgggtatacacacaaacactattagttgcagaacaaagggtctcataaatcaaggcatttaccaaatgcattggtggtgatacaggcagacgcgtcatggcaaaggagggaagctggcctaggttgtaaatgctatctaatggcattcttagctttggaattggtggaagctggtggcctgccagggctaccctttaaaggctttgatagtctcaaggctaataggtcagacacaggggtgggtaaggaatggcttcctggagttcaccattgtcagggcatgtattcaccacatcaggctcctcagtagcctttgtggttgggtttctgagaccacagggacaagaaacaggaaagcagttgttagtgtaggaaagagcccagtagctgcagggcccctgccgtcagtcaaatgacggagggaggagaggcggaacaggaggcagaggcaggcagatatctatggttcccagacaggcagggatccatggagaaatcctatgtcaaaagacaaaaactaggaactggagaaatgtctcagtggttaagagtatcaactgctcttccagaggtcctgagttcaattcccagcagccacatggtggctcacagccatctatcataggatccgatgccctcttctggtgtgtctgaagatagaaacagtgtattcatataaattatataaataaatctcaaaaacaaaaactaaaaaccaaccaaccaaacaagcccaggaagggtttcacttgtctgtaaggtgtcaccccacactcaagcctctccagggcttttctaaccattttcaaagagatggaactcctgctgaacagttacactccgggccccactcctctctcactctgtgggcagctgcagtcataccctatgctgaactgttagggaagatgaagccactggtccaacagaagctgaagcttaggctccgatcagcgccctgcggagagctactgagagtctctctctgtgtcccctccccagtctggaaggcctgagataggtgacatcagctcaggcctcctgcaaggctagacatgcttctgtctcccacgttctttgttctggaattctattcaggggaacctttgaagatggctctcccctccttcaagtggatctgggatggggggagggcggcatgactcattttctccagccaggccacatagccatggtatgtggagcattctttctggtaaaggggtgttggctagctaggaggagcaggcataggaagctagcattgaccaagcagccatccagtggccggtcctaagtatggggggaggggagggagagagagagagagagagagagagagcgcgcattgaccaagtagccatcgggtggtgggtcctaagtatgggtctgggggagtggggaagggagggagaggaaggaaatgaaggcttatgatctgggccatctggctgattgtatctttcaagtcatgtaacctatgtgggccccattttccttatttgccaataggggagggagtcactacctggaccccagagcctgcctcaggactcactccagtgtgctctcctcacattgccaccctagctcatgtgctttccagaccacctatgtagtgagaactggaagaccatttccatgggaaggaagcagaggctgggaacagctagggccacggtgtacaagtctgtccacaggactagcctgtggaactccaggggctgatactgacctccaggaccctgagaaggtctagcctacagaaagcctcttgcccaaacatcctggatgaggaaagcaggcccaagaaggggaagtagcttgctcagggggcctggtcatcgtggctaaccctcatagccgccaagagcgatctgggaagggaaaggaggaagttgtagaggggggtggaggtcgtttctccacccaatcagtgagacatggtgggctctgacagctcacaggtctgaagtggcacactcctacccccatcccagaggggtcagcaggccacccctgcatagcaaggcagctggacttcttctatactctctcaaggctaaggcagaagatgcatcttcctgccctcagatttcctgtgcccgtcctcctggaggcctgggttggtcccctggagtttatttagagtgaccacatgccacatggcaaaggtgacccaacagctggctcaggggggcttctagctgaaggcactgtctctactaaccaccagggaccctggcctgacatgaattattacctggccaccaggctgggtgtggcttctagttgctttcaagtgctcctttctctatagataggccgtgttgctgtgaccagcctggcacacctgtgagcccgtggcacctgggttaaatcctgacatacagccttgttgtgaggtggagacaacttgtgtcatcattttccaaagataccttttgttctggcttgggccctggagcattggttgcttatattttgctgtagtgtgttttggtttgctttgctttgcttttggaggcagggtctcattccacagtttaggccagacttgaactcatgctcctctcactccagtcacccaagtactggagttacaggcattgtgtcatcatgtgcatccccaaaagcctgtggatgttagtaggggaaggggagggggaggggnnnnnnnnnnnnnnnnnnnnaggccattcaccttgtttattgagacagagtctctttctggaactcagagctcattaattcagctaggctggccccagggatctgcctgtctctacttcccccatgccacagttacaaatgggtgccatcatatccagctttttattttttttattttatttctattaatcattccattcatttacatctcaaatgatatcccactccatggttacccctccacaatacaagtcccctatcccacaacctccctctcttccctcccctttgcctctatgagggtactcccccacttatcccgccatcatcaaacctccacaggaccaagggcctcccctcccattgctgccaggcatggttatcctctgctacatatgtatttggagccatggattcctccaggtacgctccttggttggtggtctagcccttgggagcactgggtagtccgcctctgcattggtcagttgctggcccgacctcccaaggagcagccacacccagttcctgtcagcaagcacctcttgacaacagtgttgggtttggtgtctgcagacaggatggatccccaggtggggcagtggtccttccttcagtctgtgctccattttttgttcctgttcttcctttggacaggaacatttctgggttaaaatctttgagatgggtaggtggccccatccctcgaccagggactgtgcctatctactggaggcagtctctacaggttctatctccccttctctgctatagacatccccgttgtgtcctgcatacccagcttttaaaactatagtcactagagatcaaactcaggtcctcatgattgcatatcaaacactttatctctaatatcaaaagctatctccacccacccccaccatgtagctccggaacagggttttgctttgaaccacaccaaaagatatctgtttaaaattaattttcttttaatgcttaaaagtgaaataacttctgggctgagcgcacagtggccctcctcagcttgaatgtctgtgggactgtggctctggggtgcagccaacctggaagactccagcttctgtcgacttggcttgggcagtctcctaccctccttgggtgtcctcattgtcctctctccctcaatgggtctgggtgttttcatcagggcaaaggctgggatgttctggcgtggtatccacataccatggggcagatgctcagcagagcttgctactaccaggctgtgttccccgtggcccagcatcccagccacagaaacctttgttaggagtgaattaagagagactgagccccaagtctctcatctgcttgctcctgggataggacttgtgactatttatgagtcaggaggtaggatggtaagagaggtatggggaacagtgactgaggacaaagcaatctgtggtctgcacatgtgcaaaatttatagcccttcaccgccagaaagtggggcgttaacttatctgaggagaacttcagcttcttgaggtaaagggtcactcaagtgacacctgtggagactcgggtgaagaacagtgattctatacagaaatggccatcaggttcctgagtagtggcccacagcataattttcacctcgctcttcagcggtgaaaggatagcgaagttatcatgggaactgatgatatacagctcagttgtgggacctttagaatcatcaaattctaaactaaaaatgggtgaccagggagggaacaggggctcaaccagaacagggaatggtaaaggggccgctgggggttggtatgctttgtaaagccaaggatatgtttcatagagcatggtacggtgtggtgggagggggtggctcagcaggtcaatgccaggcatctctccccacacctgaggtaccaaccataggatggtctagaatagaatagagtttatttggggggcatggaaagggggttgagaaggtagtagaggcagagaaagaaaatgagaggagagagagagagagagaggagaggctggctggaaacatgtagagagagagggggagaaggggaaggggagagggggcaaaaggattctgagagaaaaagggtcagagagagcaaagggaggcctaatggtcccttttatagcaagccaggcctacctggctgtcgcaaggttaacagttgggcagagcctagaaggaatgctaacatgctaacaagggtagatgaagctaggcctcagtgttttctggctggtgattatcaaaggcaggctatcctgcatggtgtcttggaagtatggaggtcataggctctggatggctgtgtctgggaatggctcaggtcctggagtgctgcccaggactgcagaagatccacactaacaaggcgaagcccttctcatggcaaatgcccagcaggttgtagtggatcaaggaagggctttgttttcttaaaagatttgtcccattatttcccattatatgcatgtgtgcatgtgggtgcctgcagaggccaaaagagggtgtcaaattccccggagcagagttgtgagccacctgggatcggtgctgggaactaaacttggtcctctgcaagagcataagtgttcttaagctctgggccgtctcaagccccacacagggctctattttcatgctttaatttaaggtccaatcatgggcaggatctggatgacaggctaagggtgtacaggaggatgtgagagaagagaaggagctaggacaccccgggtgactctgccttgggtagatggtggacttcagattgagagcttctttcctataaaagtctatccactgagaggttggtgtgggggtgaagggggaggcgaatgggggtgggcagggatgggaggcaagacaggcagctctgagggacttggcacttccttagaacagctgggtcacttgtgactgtggctcattctgtctgatgccacagttgcagacaggggctggataggagtctccagcctaaggcaggtgccgtggggactctagctcctgaagacttggactacagggtgccctcccgcctttcatgtctccagcatggcaggtgtaagtctagtttggttttccttttcttctctggggctcagaggacaaaaagatccctctagagagtcaggactgggcatgtggggacaggaaacatagaccctggttagccctctctgcaaagtttcctaagtttgtaatatgaccccaagtaagcctttctctccttcagggttcattttcctccctcccttccttccttccttccttccttcctgaaaatttatttgttttatgtatatgagtacactgtagctgtcttcagacacatcaggagagggcatcagatcccattacagatggttgtgaactaccatgtggatgctgggaatttaactcaggacctttggaagagctcctaccactaagccacctctccggccccaggattcaggggcactgaacgaatccttcacagttctagggtctgtggttttattgcctgaatgcttacactcagctcagggaccacacagggaaaggtgggggtgggggtctgtggcttctcactcattttttccttgctgctacaggccttgacctgggagttccctaggacggcagaggccgagagtgggaagctgtgatcttagctcacaaaaaagtggctgccctttaaaagactttaaactaaaggaacctggttcaggatggtgcagcctggactggaggggaggggttgggggggtaggagatgcctgccccaaatgggcctgcagcaggttgaagaggcaactctctcaggctggggtctcagatagccagctaaggcctagattcatgtctcagtggcctgtgggctgtggtcctggcccagccctctgcaaagctgctcaaagaagggggacgtgagcttgggggctgaaaccttagagagattcaatatttccaagttggctgagtgtggcgctcatttatgtttctcctctgtagtcctcccaacatttgattctctgtagaccataatgtgtgccaagcaccccctgcagggcttcctggagctgtaagccagggctacccgcatgctaggcaatcaagcaccctacctctaagccagacataccttcagcccctctcttgactttaactccacccgtgcttcacacacacttgtaatttgaggggaggcctggagcataggctggagtcaggctaagtatgggtgagcccgggaaagactcgctgacctctgacaggctctgtgggcagttttggatgtgcggtcagggaagctggggttcctttcaatcactggggctttgagaggatctgagggaacacagaagacagaccagggaggtgccagatctcccctatccaccaagggtggagggttgatgaatacgaggcccccaaagggagacagatgtctcctactttcttccaggatttgtgtcccactgcctgtagtgagtcacctactagggacccgggattgctgcagcgggaggcctaggtgtggcatgttgcagaaacttccatgaactttctctgtcctcctctggttgcccacacttggctgctcagacatgctcagaacccactaatgggggacatgggtgtcaagttagtcaggggtcacctggacgtcttagcaaggcctaagcacaaggtcaactgcatcccagaattcacagagatgccctttcaccccagttaagaggtaactcacagctggggtgcagcagacctggagccaggcagctggggtgctgcgtccatctgtctgtcacttttacttcctgaacctgcttcctcacttagctaaagtcacaatgtcataagggcatgagcaacgccaggcaggcattccacgagagagaactgggtgctgcggccatagaggaggctcagcagggtccttcttgacatggaggtcagagagaagctgttctcagcagggttcctgcttcccttccgggatctcacagggtcctatgtgtgtttcagtgcagggacttcacggcccacacagggtatgaggtgctactgcagaggctgctggacggcaggaagatgtgcaaggatgtggaggagctgctcagacagaggtaagcagggcggggcttggtgggcaggacagggccaagagggggcagattatgccccctcgagcccagctgccctcaggatgtgtcaaaagctaagnnnnnnnnnnnnnnnnnnnnnnnnnnnnnnnnnnnnnnnnnnnnnnnnnnnnnnnnnnnnnnnnnnnnnnnnnnnnnnnnnnnnnnnnnnnnnnnnnnnnnnnnnnnnnnnnnnnnnnnnnnnnnnnnnnnnnnnnnnnnnnnnnnnnnnnnnnnnnnnnnnnnnnnnntgcatttgtgcactcatgcacactcatgtgcacctatgtacctgtacttatgctcactctctctgtctctctctctctcttttacacacacacacacacacacacacacacacacacacatacacacacacacacacacccctatctcacactcacacacattcaaagccagagccccttgttgtctcctgtggcccttaggcctgggcctcccccaggggcatataccatgcagcagcccttaggacaggcccatttccaactgacatttgtacccagaaggagatggtcctgccagcagagtatgacaagagaacctaggttctgcacatattttggggccacggccagccgacagtggtgaccgggacataatgattgctctgtccttacagggcccaggcggaggagaggtacgggaaggagctggtgcagattgcacgcaaggctggtggccagacagagatgaagtaagagtgctggcggctctacctttcctctgagggaccttctgggctttactcagggcatgggactttctgatgtggtagactgggcaggaactggacaggggggtctggagccacgtggtgcctgagatcagggtcttgtactagttagggctctggaaagagcagagtatatgacacactgggctcaccttacccaaccaggaggggcaggtgacaggcactattcctgtccattgcagggagtctgtgtgaggcatactcagtgggctgtgagtcacctgtggctgacagtggagtgggagatgctaccaacagccagcacagtgtgtgtctgagctgggcatcctgtgaatgggggtcaggccacaatctcccgcccattgtagaaggatggctgcggggcttgaggctctgggtcggtcttgctttttttcttatagaaggctagaggaacagtgtttgtctgccttgtaggagtcccaagtccctgtctgtgaaaggagatagcttgtagtgacaggcaagatatgctcagtgagcagtggggtctctggagactcacctgtcccacccaccagcccctccgcacagcagataaactctgctgctcactcagaggtgtggctggcttcctgagctgtttccttcaggctggctagtactgaggccatgggggaagccacacagtgagctggggagcaggaccctagggtaggcttcatgcaaaggggtaccccggagacaagcaaacccacaggggcaagataaagtgaccagagcaggccaaggtctgagcaggagagcagggctgtctggggttccccgaggaggaggggcattcctgtcttaactacctgtagacaaaggctcaaagatatgacaacatcaggcgcacttagagcccgtgtgccttaccttttccctcagagctgtgccccctgcaagtcctgctgacccctgcacataggtgcatccggaagtgatgttgctgtcccatgtggcactgtgtaactgtggaccacgcatttgtcatcagcgcatgccttcagtgagcatttatgggatatctgttatatgtcatggcctggactgtcaagggagtttaagaactcaaaccactgagatgaccccctcctgtagcattttgcagcagactctccccaaggcacttcttccaagagggcctccaggtttgcctcactgtcaagagcttggctcagacagggtcatcctctccatgccaacctggagggctctttacagtgttgttagtcttagcggtctggaccaggttcattttctctgacagttaagaaattaaaaggcaggggctggagagatggctcagaggttaagagcaatggctgttcttccagaggtcctgagttcaattcccagcaaccacatggtggctcacaaccatctgtaatgggatctgatgccctcttctggcctgcaggtgtacatgcaggcagaacacgatcacaagtaaatctttcaataaaaagaaagaaacggcagaaaaaatctggaacacaagaagtagcagcaggcaaaacctcagacgtggcagacagaatcaattgctacagggaagcttttgttaagtacacacagcaaggccaacagagaaatcccatacaaagcagaggagggtactcaggacccaggctgggagccttagggacctttgtggggtcagtttaaacaaagggatggctgataggaccacaaggtcctgatccaccttgctggatggtctgctagcaggggtagggggcacactgggaagacagagcccaccaggctgcacctccatttaggaggaagaggctgaacgtcttcctcctcatcacccatctttgaacccccatctgggacgcccgctccttgcctaccctgttagagatctgccaaacacctagtccctcagcagggaatgcaagtggatccacaacacttgttctagtcgcttgggggtgggaagtgttggtccttaggaaagggcctagctggtggccatcctccaacacccagctccctggattgaggagctgtcctctctgcctacaagacagggtagcagagctgagtaaacaatgagacaaaggcctgggggtgaagtgacttcgtgactagcccacactgagagagctccactggctacctcctcctgtgcagccctcaaaccagcattcctgcctcaggcctcacactagctagggtctcacagggtccccataaatgacaggaagttttagtcacaccttagaatgagttttctcactcctcactcctgttaccgtagtgaacctgcctgagcccctgtgtggcttttggtgcattgtaaggacaggctaggtatttcaggagctgtcatgataccgcacacaccatgatcagccttcctgtctggtcctctgcttctgcccagaccctcaccttgctcaagaagtagtcacctcctcccactcttcttcttgccacaccaggagggatgctgtgggtgccttggagaacagagtggaccttggccaatgtcctgtgagcccctctgtggttacagatgagcaacattagcccatgggcaccttaaagcccacctgaccttcacccctcctaaacacaagtgctgagatggtcccatcagaggagatttcatgtgttttatgatctctgctccactgagatcagggtgaaggcatgtctcctagtgaggagcagttatactgtgaaactagacttcagctagagtttccaggtctcctgagagccaagctacagactagcaggttgtgttgcacgtttgcacattggtgataaatgccgaaagtcagaatcattctaacctgtggtcaccttcctctgcaaggctagccttgacattttatcttttaggatttgcatttgtatgtctgctgtgcggatgtgtgcaggggcccgtggaggccagtggtgatggctagggctggggttacagggctgcgagccatctgatgtgggtgcaagaaccaaatgtgctcttaacccctgagccatcgataagtgcagcccttggccttgaggttttgcctcttaccacctggatggcttttggcctcagtgactcagtttccttatctgtaaatggcttgtgggcccgaggcggaaaccattcaggctatcctcatcctgagtgtgtcagcactggaaggttaggactaagtggtcagcggttggtcactggcagaggcctgcacatctgcatatctcatggctcccaggctgttgctactgctccatggtcttgtcaggcaagacacctggcagtaactaggaccccataatcctccttagggcctggatctccaggggtcctctcaggttgccactcctccttggcctcaatgtccccaactgttcagagagaagaggaagcccccatggaacatattcatcctaccccggaaggaagcacaggcaggtgggcttcccttacagttcacccagggaattggttatgtgacaggtgccacatgactatattaccaccagggggcggaagagcgccctgcagagaggcagtgaaagcttgcaacaagggcgctacttagctctcgatgctgagcgtggagcaggctgtgccaccatgcgtttgcttttgtgtccttaagagacgtagtacccctaagcccaagctgggagcgcagaggcacatctccctcacatgcacggcctgatgtcactcagctgccggagaggctctgggaaaggacggaagctggtgtagccaggcagagactcctcctacctgaagttaaggatgccgcttctgggaaggcgccactggaaaactcttccaaagtgcaactggggttagaggaagacctagttcggctgctggtgcctgggggatgtcctggggactggcggagtttgcatatgtgtgagtgtgacaggcatgttaagctcctgacttgcgccaggcttcaacgatgccttatagtgagtggactatcattctcaaaaccactttgtgctgctaactgctcaccatagaagggaagtcaaggcagagggccaggtggcttgcccagggtcacacagtgaataagtggtagagcctggccatctggctacagggtgtgctgcttttgtgtgtggagaccggagtaagaggccaccgcagatttcctaggttggttcccacacacactatctgccccctcctctgaatggagcacatgcctctcgagggccctgctcctgagagcttggactcgcgctcacagtttccgtattggccccaggactccgatacccaccgataaacagcagtgtgtgctggccgagccggcatctctgcttggccctcagcgctaccatgctctggggtgaacaaggctgccggagagaatccagggcgcccagtgtgctgttcaagtaaactgagcagagtggggatttctgtgggaagggggtgggagcagttgggacagagtctttttttttttttttttttttttgggcgcttatgatgaccttaaacttgtggcctgtctgcctctgctgcccaggtgtcacccccacttgcccaggggcttccactttacctggcagcctctcctgcttgagcactgttctagctcccatacagcctcctccttcccctccccttggtacccagcctgaagcagatgccatagctgtccctggctctgtccctgcccacctcccagcctttccttatgccttccatgccacctgctggaaagagctataaagaccttcccctgcgtcagattcatccaggcaatattgagtataaccaggtgcctgcatgggcggaagtctcatagaggctgggagcttcctgtggacacacccctcttctctgggctgcaaagacatggggagtgagaaagtgggggacagaactgccgtagcaaggaggctttcccaccacagcaaggttccactgctttttaatttacaaagaaaactgttttctagaatgtcagttgggggttacatgaatgatgaccatggccaaaggtcccttgcatccatagtagtcaatatggcttagggccctccctccaaaataaaacaccatgggtcaggcaggacgccaggctcctgcagcatgctgtctactgacctagacttctgttttgcagttccctgaggacctcctttgactccctgaagcagcgtaagttccaaccatccccacatgggcagcagggccattagggtctcctggaagacccttagcccttgtatggggtgactaagttaggagctatgtgcttgggctgtggtccagctctgtgccaggctgaaaggctgatggaagatgtgagggtgggaggtagggtgagggagacagactggtccaagcagaggccacgctgtcaccctagaaacagagaatgtgggcagtgcacacatccagctggccctggccctgcgtgaggagctgcggagcctggaggagttccgagagagacagaaagagcagcggaagaaggtgagggggtggggagggcgaaggaggggaggtgggggacccccccagaggccacccactcactgttctgggggccagttgggaagcatggcttgatgaaggggggagagtgtgtgtatgttctagcttgctttcctgttgctgtgataaacccctgacttgggaagaaaggtttatcttctcaggtcacactccatcactgagtgaagttagggcaggaacctagaggcaggaactggagcagaaccgagagaaggaatgtttcctggctttgctcccagctcatgttcagccccggttttctcacatagcccaggtctaccacagagctgccaggagccaggaagagaaagggtgtggagcttttagacgatcctccttcatactgtgtgattaagtatccaacctgagttgagtggcccctggaagctggctctgaacacaaggattagggctgctggttctggagacaggcagacttggggcccgtagtctgcatggctgctcaacaaggagcggggagacagttccgagggaaagcgcaggcatcagacttgcctcagcatctgaagctctgctcagcaatacacagagcatggctggccacacgtggagtggctacatagccaggaagtgagctcctcctagtgggctggtggtgtgtaaacacaggctgggggatgctctgcagggaggctgacaaagctggaggtaggcaagtcctctcccagacctgcgacggatggatgggctgagcacttagcccacctggagagcaagaggttacttcacagcaggggccaggaaagtcccttccccttcctgtgcctgcttctctcttgtatgagatccctcttgttcacatcccttgctttgggaacttggcccttcacaaacagggctataaggcagtaacttagctcgttgtatagctatgcacccttgctacccatccggacagctcaggcttacaggaatctaagttgccttcctgaacagatgagcccccaaagctatcccccaaaactacctggacttggtgttcgaacaggtgacccctctgctccgaggcctgctacagagcatgtggaaaacctacaggtgtcaggggacatgggctagactctgagctttgtgatccgaacagctcctcccccaaacacccagactctgccatcagagcctgagtctgtacactgtccacgaggagagggacacatggtgtcctcggctacccagatgcacaagcaggtctctgactgtgctgttgcctctaatcaggtggcttgccagagcctcccccaggacccccgggcacaaactggctccaatcctaaagccagaggcatttacccccattctcctgactgtaagcctcggccctggccgttcccctccatccatctaacagggagccgggggtgggggcggtaaaggttgtgctgtgcctgtggtgtggctacatgcatgcgtgatgtctggcctgcggtcactaacgggtgaacactggagtgtggtgtatgtactagtggcctgtgggtatgcaatatgagcagttaggcgatggggctgagtatggactaggtgtgcacgtatatgccagtgcacactcagtgtggcttgtgaatgaaagactcaggactcatgtgatgtgtatatgtggaggtggggagtctctggctggagagcaagtcaaactgagtcccacagtaaggaaacgctagacatagccactgcccaagcttctctttgttgttctgtcctgagtattgcagttttgtttgtttgtttgtttgtttaaggtctcactatatagccttggctgacatggagcaggctatgtggaccaggctggcctcacactcatagacatcctcctgccgcagcctcccaagtgctgggattaaatacctggctggtattattttgaaggaggtgtctctagaagagggtggacacagacacacacacaacacagacacacacgcatttatgaatgagctcagagggtgtcatgtcccagggacaaggacaacccatcctcttggcctagggaagcgttttgaggccagagcccccagctcagagcctcatgtctcctgcagtatgaggccatcatggaccgtgtccagaagagcaagttgtcgctctacaagaagaccatggaggtaaacgggagggccttggaagtccctctgagagtcctgggttggacttctgggacaggcttgcctcagacctttcttcattatatgtatcggcctgttgggggctgtgctcgaggcccaggacctatttatcatcacaagcccctcagtgccttgcctgaagaacagagggacagtcccacacgcaggagtccatgagtgatccagtcatctgaggagcccagagtagcagggatatgggacacatgagagggcagggcagtatagaagacagggccgagtcgagtctccatgggaacgtgcttcagcctctgcatctctgtccctgggagtgatgccaattctaccaaagtccccacccccgggaagggagtctgggcttagggagcctcccacactggggcatgcagccctgcagacacgcctctccacaccttcagtccaagaaggcatatgaccagaagtgcagggatgcagatgatgctgagcaggccttcgagcgtgtgagtgccaatggccaccagaagcaagtagaaaaggtgtgtatagtgtgggggtgagggtgggaggggaggcccttaaacatagtacctgttacagaccagagctgagactgagagggcagagggctgtgggtgagttgaatccaggctgaccatagtccaggttctgcgcagcgatgcagaagaggacacatagcatctacattctctgtgtttcctggtggtctgcaggcttctgcttttatttcccccttgtggaaccggcctgagcccctcagcagtaaggctgctggtgaatgatagaattcacccatccatactctgattccggatggtggccagggagggtgccagtcacttctgagtagctctgaggctaggattcctgggcttggactcagtgtccctctcctgtctcctcagagccagaacaaagccaagcagtgcaaggagtcagccacagaggcaggtacgtagccctggccaccttcccagactgtctggcagcctagccggtcctcttcctccagacggtgctgtcccacctgctagcactgtccactgtgtgcctctccaggcgtgctctccagagaccattcctccttagccactgcacacagccataacataaggaaccgggcacccaaagcacgtagataagctacccaatgtcacacagctgctaagtggtgctgacagcatttgaatctaagccactgggtttcagagcctcagatccacagggccacatcccttcatctagctcaaaatgacaaacgctcacactcagccttcctggctcctgtcctttgcctgatgccagcatttggccaccccaccccccccatcctcccatcccaggatggcatccttcttccctctgttccacctctccaacatctgctcctccctcagcaggtgccacaagaccaagtcataacttcagcttgctatcttgtagcacaacagcttatagaggtgccctccttgagtctcagtttaccatctgtaaagtggagtaacacctctgcatattgagttctgctccagcccctggagctcacagcatagtggggaagtgggaagggcggtgcggtggctgtgtgtggtgaccaacagctagccaggcccccggggaggggactcccgggacttggggaggttgtgctgggtgggtctctggaggagtgaaggacagaggacggaactgtcttggaaactgttagaggagatccaggctaccaggcctgccgaaggctcccctgtgtttgtagaaagagtgtacaggcaaaatatcgaacaactggagagagcgaggaccgagtgggagcaggagcaccggactacctgtgaggcaagtggcccagcaagcagcctgctcctccacaagctcctcctacctgtggcggggcgcgggggagcacggggctggagctggggctggggagacactccctcattccacttgacacctgctgggtctctccccatactatctggccttatgccctggatccctttgttccaccctgggacctactgatggtcaagaccagggcagagtcctgtacctttcacgagcttcccccagcctccattctaggacagggaccgatggagatgcaaacaggcattcctaacagtctagcctccttccagccgctctgggtggggatcttctgggctgcctttgctttagacttggctgcagcagggtgctctgcactggtcacctagctgagcggtggtggtgggctgccaggcctggccccatagttagttctctcccttttctcctcactaggccttccagttgcaggagtttgaccggctcaccatcctccgcaatgccctgtgggtgcactgtaaccagctctccatgcagtgtgtcaaggatgatgaggtgtgtgctgaggggagggagggcagcatggcaagctcagtgtcccccacctctgcacttcacacagagcagtctgacatggcctctggcctggcctccagcatgggaacagcgcgcttctctggtcccccgcctctgccttttcctcctacgtcccttcagggctgtgtccatctattctccccaacacagcagagacttgctgggggtggaggggctttgctccaggctctcttacacccctccctcacccccctccctctctcagggatggccagggtacttcttcctccctctctcgccttataaaatccaatactcagggatggccatagtgcatcataccccaggttagggggggctaccacctacagcaggagctctggttctgggtgctttaggggcacctctgacccctcctgcccttggctagttgatcctggcggctttctcgtgtcagcagaaagtgtgttctctagatattcccatgcccaaagcccagctttaccgagagacctgaccttagcaggtcactttcctgtgtttcttcatctgaaggcaggttaaagtgtggacctcggaggacaggagtgagccgaggcctctcctcagtccctctggctcagagtcagtggcaggactatagtaaggctgggagtcaggctgacattggggcgaagcctgaacacagcctttgctcacccctacccccagctctatgaggaagtgcggctgacccttgagggctgtgatgtggaaggtgacatcaatggcttcatccagtccaagagcactggcagagagcccccaggtaaggccctgcctgagggcagcttagtgtccacagccaggtctggctagctctacaccaggccaggctcgggtggttcacacttccctactggatggaggtagaccaggcccaggctggggcacagggtagttctactcttctggagaacccattcagttcccagcacccacaccaggcacctaacacctctggcttccacatgaatacacacacatctatacataattaaaattaataaaacaaaatcttaaaaaaaaaaaaaagccaggcacagtgttccatgcctttaatccctgcacggggtggcagaggcaggcggtcctctgaacgaggtcctcgctgctcttggcctcatgcatttgctctctgcagctccggtgccttatcagaactactatgacagggaggtgaccccactgattggcagccctagcatccagccctcctgcggtgtgataaagaggtgagcacccgatgaactgcatatgaccaggacacagctgcggggtcagcctgacttccacatctcatggctgaacagctcctgtgggtctggtaccctgttcagaagctggccatcccattgagatagtccaggatcaaactaccgtcagagcgccccgggtccaagagcatccaagtactaattactcacactccagttattcaccaacgactatgcggagagtcccgggcaagtgcccactctggcttccttgtctgtctggccctactgagaggcagcacgggtgacttccaggtggcttatgaatggcccaaagcccagacatttggattcaccaggcttttagagggccatctccctggcctggctgtagtcaggtgccaaggccctagttctgtgtcctgtgggtgacctggcctagtcattgcgcagccaaggaaaagacgacttgcttggcccacactggctgggcctggcaagatatgtgggagctgaactttaaaggtagcttcctcctccccacagagcctggggctggggatctggtgggtttggggccctgctggctgcaggtgtggagatgaccaggagagtgaccgtgggaggagaggatgctgagaacgaagggactatcgggaatggctgtggggaggcctgctgccatggaggcctgtggtggtagcaggttggcagaggtcctgaagcgctgagaattccctattatcccctttgcttccagtgaggtaaggcaaggcctacccctcttctctcctccctaccaccaggttctctgggctgctacatggaagtcccaagaccacaccttctgctcctgctggtaaataagggggaagggctaatgggacaggggacatgtctcccaccagtggggatgagaggactcctgtatagcattgatggaacactaatgtcccagagggaaaaggtattctgtccaagagtgtggatggtgtaggattaagccccaccccagcagtctcagattcgggcctcatcctgctctcagcttccacagagactctgactcccacccctgagcggaatgagttggtctacgcatccatcgaagtgcaggcgacccagggaaaccttaactcatcagcccaggactaccgggcactctacgactacactgcacaggtgagggcttccccttgcgcctgggagcacgcctggggcgtgagcacttacatagcaccagagactggaatagttcagtggacatctgctggaccaggatctgctgtggatggatcaggccttgttctgtgggttgagggtcaggccttgttctctagctgtggacccaaagaagcacaatgaccaaaaatgagtccttgagctgccctggaactatttcctgacatccttggagaaaggtgggcagggcacccacagagcatctgtgctagagatgggctgaagtccaacacaagccctgggcttaagggggtaggggtagacctagaaggcaggccctgaacttgggctaatatacctgcacatataggtagacatgtaggcaagctagatggggctgtactgaggtcacattcaggggtacagacctggacagtaacagggtactcaggtagcagtagattgctgtgtgattcgtctagagcttgcccttgcggtgtgacaagcacttctgaggagctgcagtggttggagcagtgagagaagcccaggatgggaggtctccatgacaacctgagcttgttaggaggccaagtgcctttggggaaccccacagcctgtctatctgcaaaggaaccactctggaggccttagcatgactcagcagactgcttgccctgggagacaaacatgcactgccaaaatgggggccgcagagcacagcaccccgtcctggtggctcctcccatctcacgcacttgccatttcttgcccagaattctgatgagctggacatttccgcgggagacatcctggcggtcatcctggaaggggaggatggctggtggactgtggagcggaacggacaacgtggctttgtccctgggtcgtacttggagaagctctgaggaaaggctagcagtctccacatacctccgccctgactgtgaggtcaggactgtttctttccatcaccgcccaggcctcacggggccagaaccaagcccggtggtgctgggcatgggctgggtgctggctactctcaataaatgtctcccagaaggagtaaagcggcacattcttcctttgctggggtccttttctcttacccagtgtccagggcctcgatccagagagccagagtatacagaggctgggagaacagagctctgccactaacaggagcagtcaggcccagtctcagccagggacagaggagaggcctcgacccaggtgcccgaagctcccaggctgtcagagctacattcatacttgggatagctaggaagatgcaagtgagaggggctcaggagggccacaatgagatgaggcatcctgtgacagggaagtggggcacagaaggatgtggagaggcggcagcagccacgtttgccagaaggcaaatgtctgagcatacataagaacataggggataagaagactgctggggacgagaaagcgctggtggctctggaggcggcacacagccctcagtgttcctccttgacacttgtcatgtctgtgcctacctcacaggaaccagctgtgggcccgtggcttccctgcctgcccacctggaagccagcaatagaggcctaaccatgtaccaggcaaatgtcagcagccagaggtgaaactgtgagcaagtatggtctagagagaggggaggagggggttgctgcaaggctcctccatgttcatcaccaatgcatctccattctctgatcctcaccggagcagaaaggcaggcttggctaagcaaccatgcaggttgacaaggctgggccgcctttgggttgtgctctcttatccatctcagacatgagggcactttacaggctgggtccaggcagcagattgcctggaaccaaggctctggggctgaggatcaggctagctgttctgaggcgtctgccatcactgcttcttggcacagtatgtggcagacagaatgggaaaaggctttgagcgactggaaagaaccaggctgatgttgactggaaatgtcattttccttctcatgaacatcctgtgaggtgaccaaacaccacacccatctgtgacacatcaaatatccacacagggatatttggagagtgacttaatccagggcttggtcccctcccttgaaggacagcaaaatttgcaaataaaagacttggctacaacaaacctgcttggtccagaaaaccaaagtgccccgggcacccttgtcttaccctgctgggcccaaccagactcctgcacctgacagtcacagggctggtgcttgccaaggtgccctgacctcactcttccagggcggcacatggccagtggggtcaggggatggttccaactacaggatgaaggctgtctgcaaagcggccactggactagagaacgcaggtgaacagagaaatgaatggcaatagtagtgtctggagtgtgcaaatggatgggagagaggggaggggaggggaggggaggagtgcaaactctgacctaggcctttccaggtgagcaggtcttccctaggtggagcaggggacctggggcaggcagaacaagcaagcagattgactcttggtagtaaagagggaagagtggaaagttctctatcagagctttttttattcttagaaaataccttgtcatcttgattgatcatcccattccactgcaaagatttttaaaaacctttggcctagaaattcatcatctctctgacaggtactgcagtgtcagtaggctgcagtggatgatgggtaagcagtgtgcgataggtaacagcctgctctccaggcatccagagaaaggaaagagacccagggatcacaatctatataccagggggaagaaggccacataagcttcctgcatctgctgtgcatcaggtcacaacgtcagtgcacagggggtcaatgccagatggaggaggggctggcataactgtgtatataaataactacagcatctccctgtcgtgtcagagggagggtggctcaaagacagagagcagcagagagaagaatgtggcctctcctgtcagagcatcaggctctaaagcagctcacccacaggcagtctcgggcaagcctcaattatccctgaatatccatcaccagtaggaggggttcaacaggtcttatgcaaggcacgacttcaaagtgttaaactggtcaaacactaattaaaagcaagggggtgtcactttttatggccgggctcacacctctggatcttggctgtgggaagaagcaacagctcattcagcacgtttcccagtggggaccgacatcagcagcacggctggtgcccagcacctaacccttaaccactttcccctagctgctcttgggccaagccagcttagcgtgacctactccatggtctggctacttcccaccatggctcctaaaaggtcaccacatacagtgccctcaggtgcctcaggctgttgagatcacagggatggggctgttccaaccctgctcagcagagcccaccacagggccaagggataatgctcagttggcctctagctgcacttgaggttcacccactggaccaacaggccgctcagggaactgtgcagtgcaacctgtattccaaacatgttcctggtgattccgatatgcagtcaagaacctcctggttaatgggccttggctaggcttctctctccaaatttgaaaacactgtgtggtaccactctcctgcctcaaaccaggagtgtccttccaccaggtgtctgtcaggcccttaggacgcttctcctgtgttcccatacccatgtctgtccttaccataccatgtctgtctcatacccatggtctgtatgagtcaccctcccctctaaaagttagtggttaaactcagtggtccctctggagcaaccttaggagaccccaaagaaacaagagacagccatggaaaacacacaactgttttcaagattggcaaggatgctggatacagggttaacatttaaaaaccaggtgcagtgcccctgtcccccagagcaaccactaggaaaggtattagcaaaccatggaggtctcacagaaaagttgcctacacactgttaagatctgtaggaaacagaagaaaccttatcaaatgaggtaagggattatgcccaaggttcaggagacaggactaacagccaaatacacatttccacctaccagaatagaagaaagataaaggcaggccaacaccctgagggtcaacaagggtgtgggagaaatgcacatttatatgcctggccggtgacaacatacactggtataaacttttctggaaagcaatgggtcgcatctgtgaaaactgaatgtgaccttttgggggacagaatgaattactacaacccttaataggcacaaaaggctgacacgggacgaaaactgctttgaaactaggcttttggtggctgtacagcactggtgtggtttgtttaaactggatcgtgttacgctgtgagagatcgactcagaaggcctgccagctgtccatgtggcatctgtttccatcaacaatacagggcacatgcgagatgacaagggagctgaaaaattcccatcactggtgatgtaacagcagtcttcgcactgaggcacaatgtcccaccatcctgtttgtggtcatgctggtctctgcctgccatccaacagagcacagctgtgcacagaatacaaactcggattgaggtggaaacactgtacacacaggcacaggaattgtacacactgaactttgtaatcaccactgttgtaaatggtactggcaactacaccaccatgctaacaagtcctcggcaccaagacagttttaacaacaacaacaacaacatgagttgtttatttttccttgtgtgtgagagggagacagggggccagaggaccttcagtcccaggagctgacatcacagctgtacctgataggactgctgggaactgaacaggagtctataagagccactcatcaaatacttagccacagagccacctctccagttcttcaaatcttccttttactttttgagatggggtctcacaaagttgcataaactggccttcacctcactctgtagtctagtcaggccctaaacttgcaatcctcctggcccagatcccaaggcagccaaaccacagggctctatcaccaggtctcatctatgactgcccgctatcatccatgtgcttcccatttatcagaacaagtggccaggaccagcggaatatttacacctggaatcccagttcccaggaaggagggggatcaagcaagtgtgaggccagcatggcccatatagtgagtttaggcaaaccttgtctcccgtgttgtgctacaccagcagacgcttcagttgtggactgacttgactaaccactcatgtttgcatagtcaaagtaacatgtttcgaagaacatcatgttcttgttgagaagccatgtgagactgggttgtaggtggacatgctcaccatagcaaagccagaggcaagtcaccacctggtacagtggctaaccactgtctaagatggccgtgatacaaacacaaaccaccggcagatctacacagtctagcctaaaagacagtctagagaacaagattcattaagagcaaagccaaagcctgtgaccacactgctgctgttcatgtccctgaacaggacacagaatgtccttttagacttactacatttcttaatgctactttgccagtagcatcagtagcaccagcaggaccacggctcctcaggccttcttctccttgcaggatcctgaggatggaagccattctctgctgggctgtttcagggtccttgctactccttccagcaggtaaagcccctttacagagtaaactctttaaacattcctgttcacaccatctcctcactggaccaggggctcacaatgagcacacaggcagtgggggcgggcaggcttcatgccctcctatgtgacacccagggtgaacctggagctcagtctgtcttctagctacctggaattctaaagcctcatcaggagaagaaacaggagataagctcaaactgagaggcaacatttaaaaggggatggatacatgtatgtatgtatgtatgtatgtatgtatgtatgtatgtatgttctgtatgtacatatgtatgttccgtatgtagtctatgtcaacatcacttgggacagaactatgggatttctcaagatcagacatgagagctacacaaacatctgctccagcctggctctggacctgcagaggacccaaccccaaaaaggccatcgtgaggccaactgctgtgagggggagattatttcatcaggattataaggtaccaaatctggcaaccgtacttgtgattgtcagtcactatttttggaaaacacctgctgaagtacttgagggcccggtgtctatggagagagtgaacatacatatgtgaagacaggaatgactcattaagtagtgcaaaggtcagcaggcacacccgggtaaaggacaattaggcttttcagtttttattcttgcaactttctatggcctttgaaatttatttctaaataaaaatataaaggcagtaggatgcagcagcggttctcaactacagctagccctggacacacctaacagcttagggcctggtctccgcagctctaactccaccaagtgctttcattgtgcagacccctggagagcttttgctttactgagaagcagctccttgcaatctgaaaagcaagcactgccctctgccccacgtgggaccacgaagactgcaagtgctaagcagagagaagtttaatttgaagggctctggccaacaagccaaggaaaataatatgtaaagctagcaagggcaagaactcagtgattccccggctcccggctaacatggctcttctgggtctgccagcagagcacagggaagatgatgctctccagctaagcatcaaaggaatgtgaagtgtgtttcttggacaaattcaaggaatgggttaccacctggcacactatcaaagcagcttcctactctagagctagttggatcacgcggaaaaggagcaactaatgttgctgactatacattgctgggctcagtcccagcctgtgacaggagagccttagaatggtttttagcaacagcttcagtgactgtgctgaggaaggaggcttcagtgacaggttataagcatcccctactatggacaggcagagggtggggacacagtttgggaaccaatcaccaatcccagcagctctgaagtcagagccgtctgtactgcttccacaggattcggttcaatgcctcttctttgcacatctccatttcagaaagacttagaagatattcaggcaacccaacattaaaagaccctacgctgaacatgaacatatagccctaggtatagttgcatttgtcctctatttctgtgactggctggttccccagctgacagatggggctggaaatctgagattcgtctttacagtccttcctccttctgatggtccctaataatcccctacagtatgatcctagtggaagtcgcaccaggctcccaccaatccatcctctgattgagggaccaaggcaggcttgataccaccagcagtatgtcaggtttcacctgcacaagatctatatgaccaaagagggtctttgtctaaccatgtcttaaataccatcccccaagacccctgcagagccttctagcttctatgcttgggcatttcctccaggagctcataagtgatgtcactaaaccttctacgcaatgccacgtccctgatctctctgggtgtctcctttgggccctgttcttttacactaccactactgcactaataaaaattcctgctcttgtatgcgtctcttgtgttaggagttcagagtcctgaggtcaaggacagcgccatcactgtctatcccctaggcctttgtactctgcagatgttctaaatactccagaaagcacctgtggtttgcagaataccacagcctttagaatctggcagcatataatagaagcccatgcaaatcatgagaactgcagtcaacagcagcatttgaaacattatcctgctgtatactgctgctgtggaactgaaatatccccaaataattaaaatgtacatggtagggctgatacagagtttattgaattaaatttttctatttacaattgagatcacatctacatactattttgctagtctccatgggtacattatctctaacgagttaagacttatgatgaatgggttcaatcacacagagaaacgcacacactcacaccaactgctttaaaacagtagtgcatacattatagtcttcctataaagccagctttgattaaaaaccactaatttcaaagatcagtctctgattttgaagatgaacaaagacacatactgtttgattctaaaatctatgttagccattttgtacaattgctatattattgtactacagtatatattctttaaaaggacactggtgtgcggcaccagacagctggcgtcctccctcttaccctcaaacctttggccaagagttctcgttatgaagacgaaaagggcccagtgataccacaacacagtccattactcctcagaggtgacagaagcaggccacaccctcctatagctctaccacattacagaacttgtaaatggttctgaaattaagggcatggagaatcatctagaacaagggtaagaaagccagaggggcaggtaggaaggtgggtacatgaaatgccaacctgctagtcaacaccagtgtacgtgtgctttgactagatgaactcaggagccaactgctgcaggcctgctcaattcaccttctgaatcagaacaaggatactacaaattagctcaggcacgtgctgtccgctacgcgtaggttccgccagtgatgaggagctcataggcagggtctctactccgtctgcacaacacgatgcatgcgcacagcatgcccagcagctgcaggaagaaaacagtgtgaatcaaggctgacggcccctggcaagtgtgtatttctttcttggcaatgacattagttcaagctttaataacctcaaattatcaaaacgcagtaacaatgaaaaaggaagcttcttatgaacacatactatttaccagaagtagctcctgctttatacccaggaactctgaagcgggtgtgaggcgaggcaggcgcgaggcgaggcaggcgcgaggcaaggcaggcgtgcttacggagaatccccactaacagtgtgcagtagcactccccaaaccagcttctatggtgaaggaaatggcttgtgtctgcactcatgactactaagcattttaagtcagtgccactgaatttgattttaaacttttacttcagttaaatgtggctgtggcttccatgctggacaggaacaagtctagagaaacctgtttgactgtgtctttttaggcatctagacttgggggagaaaggtttcattaacaacccacaaaaaactcataatagaggaaagacaaccttagtgtcttttgaaggtttctgtttattatttactacctttgactctgtggcattattgacttatttcttgccaaggtccactgctccttcataattgtctattttagtccttctggagtagcagattgggatagagacatgttaaagaaagtgatgccagccaggcagtggtggcgcacgctttaatcccagcacttgggaggcagaggtaggtagatttctgggttcgaggccagcctggcctacagaatgagttccaggacagccagggctgcacagagaaaccctgtctcaaaaaaacaaaaggggggaaaaaaaagaaagaaagaaagaaagaaagaaaagaaaagaaaagaaaaaagaattgattccagaattcttgacccaatctctcataaaattcagagagtgacaaacattactttgccctttgtcataccaagtcctcatggacagtgaagaatctcagttattgaatttaaaaggcagggacgggacttacacctacaactctggctccttttcccagagggcacataagcaccaggagcaccaggtaaaaccctgtcctctgcctaccaactcctattaaagcacactcaacagccctaaagttcaccctgtgctctggactccatagtcacacaactactgcagaagctactgaagctttcctgggggccatgacagttctaggaaccccaggggcaacattggcaccccaaaccttagaggtcaacagaccacaaaaccccactggagacactctactggacctgaagactgacactggttgctagaaccccagtccactcaggctacaagatcagacaagaaacagaaaccaagggagaaccacccaaaaaacacccatctaacaaagataaactcagaaatcagcacctaaactgtaataaccccaaaccctgataaccagaggccagggaaagaacagaatcaacaacagccagggcaatatggcactactacaaccctgatacaatcctactacaggaagccctgatattccaatagagctgaagtacaaggaaatgaccttaaatctagtcttataaagatgataaataaagggctttaaagaggaaatgaatataatctttaaggaaattcaggaaaacacaaccaaacaggtgaaggaaataaataaaactgttcaaacctgaaaatggaaatagatgtaataaagaaaatacaaaccaaaagaatccttgagatggaaaaatctaggtaagcgatcaggaactacagactcaagtatcaccaacacaatgagagatggaacacatctcaggtgtacaagatagtgatacaaaatgacacaaactacgcaggaaatctgggacactatgaaaagaccaaacctaagaataaaaggaatagaagaagattcccaactcaaagggccagaagatattttcaacaaaaatcatggaagaaaatttccctaacctaaagaaagagatgctaatataggaatcttacagaacaccaaacagattgaaccagaaaagaagcccaccacgtaata

SEQ ID NO: 2241 - DNA, 1720 bp, Mus musculus
gttgcacaaaccttcctgtgccggcctcaggctgcctgcctgcctgcctggcctgtgcacatccttcctctctcccagcctctgcctgccacctgggctgcctgccctgggcctcagcctgcgtcctcctccatcagtggggctggcgagagcctaggctggaaatcgtggcccacccttccatcactgggcagggctccttcctcatttcgctgctgattctagccccaaacaaaacaggttgagcctttttcctcctccggcagttgcctctggcttgtggctgccttctgagcgtttcagacggcgccggctgggagtgggagggagggcctgggctagccgcgctgggactgggacgtgctcctggctcctggcccatgttcagccctgcttgaagcaggagtgctagcatttgacacaacagacgcccttggaggatgatggcccagctgcagttccgagatgccttctggtgcagggacttcacggcccacacagggtatgaggtgctactgcagaggctgctggacggcaggaagatgtgcaaggatgtggaggagctgctcagacagagggcccaggcggaggagaggtacgggaaggagctggtgcagattgcacgcaaggctggtggccagacagagatgaattccctgaggacctcctttgactccctgaagcagcaaacagagaatgtgggcagtgcacacatccagctggccctggccctgcgtgaggagctgcggagcctggaggagttccgagagagacagaaagagcagcggaagaagtatgaggccatcatggaccgtgtccagaagagcaagttgtcgctctacaagaagaccatggagtccaagaaggcatatgaccagaagtgcagggatgcagatgatgctgagcaggccttcgagcgtgtgagtgccaatggccaccagaagcaagtagaaaaggccttccagttgcaggagtttgaccggctcaccatcctccgcaatgccctgtgggtgcactgtaaccagctctccatgcagtgtgtcaaggatgatgagctctatgaggaagtgcggctgacccttgagggctgtgatgtggaaggtgacatcaatggcttcatccagtccaagagcactggcagagagcccccagctccggtgccttatcagaactactatgacagggaggtgaccccactgattggcagccctagcatccagccctcctgcggtgtgataaagaggttctctgggctgctacatggaagtcccaagaccacaccttctgctcctgctgcttccacagagactctgactcccacccctgagcggaatgagttggtctacgcatccatcgaagtgcaggcgacccagggaaaccttaactcatcagcccaggactaccgggcactctacgactacactgcacagaattctgatgagctggacatttccgcgggagacatcctggcggtcatcctggaaggggaggatggctggtggactgtggagcggaacggacaacgtggctttgtccctgggtcgtacttggagaagctctgaggaaaggctagcagtctccacatacctccgccctgactgtgaggtcaggactgtttctttccatcaccgcccaggcctcacggggccagaaccaagcccggtggtgctgggcatgggctgggtgctggctactctcaataaatgtctcccagaaggag

SEQ ID NO: 2242 - protein, 376 aa, Mus musculus
HNRRPWRMMAQLQFRDAFWCRDFTAHTGYEVLLQRLLDGRKMCKDVEELLRQRAQAEERYGKELVQIARKAGGQTEMNSLRTSFDSLKQQTENVGSAHIQLALREELRSLEEFRERQKEQRKKYEAIMDRVQKSKLSLYKKTMESKKAYDQKCRDADDAEQAFERVSANGHQKQVEKAFQLQEFDRLTILRNALWVHCNQLSMQCVKDDELYEEVRLTLEGCDVEGDINGFIQSKSTGREPPAPVPYQNYYDREVTPLIGSPSIQPSCGVIKRFSGLLHGSPKTTPSAPAASTETLTPTPERNELVYASIEVQATQGNLNSSAQDYRALYDYTAQNSDELDISAGDILAVIGEDGWWTVERNGQRGFVPGSYLEKL

SEQ ID NO: 2243 - DNA, 62553 bp, Homo sapiens
  misc_feature (1)...(62553): n = A, C, G or T/U
gctgaggcaggacaatcacttgatcccgggatgcagaggttgcagtgagctgagatcgcaccactgcattccagcctgggcgacagagcaagattccatctcaaacaaaccaaaaaaaatcttcaactgtctcctcaaggtctactccaaacaatttctaggagataagaggtaaagaataatgagttaagagccagagctctggactcaccactgaaacgaaccagggatccttggagaaaggttgatttgagagcaaggggcaggtaacttacaagataagcctgaaaacttgggccagaaagtaaagaagtgctcaataaatgatggggccataacagaagggaacagaagccaccctaaggggctcgcaatggccacatctgggataatttgagcatcataataaataataatagtaacagattataactcattggatgaaatagaacttaccaatcccacactaatataattaaatggataaataattgggagaagggaaaattcttccttacggtataataaatgtagatggaatgatgaagttggagaatcaccaacggatgctaaaactagtgggcaaagatgcaaagagaaacatgatctacatatttacatagtctcaaaggatttccccacaagatacttacaaatgactaagggaaaaacagtaactttaaggtggagaaaactggtggacactactttaatcgagtgatcagagttaacaacaccaatagtgggacaaattgacatcacgtgcctcctgttatgatgcactgagatagacgcagcatcacatatgtggtatcttttgccaaaaacacatcatctgagtctaatcatgaggaaagcacttgacacaaacccaaattgagacgctttctatgaaacaactggcctgcaatcttccaaagtgtcaaggtcatgaaagtcaaggatagactggggaactgtcacagaattaaggagaccaagagaaaaaaacacaaaattttaaaggacattacaattaatgaaattaaatttgaatatggagtgcaaattagacaatagccttatattgatgttaaatttcttcttctttttcttcttttttttttttttgagtgagggtctcactctgtcacccaggctggagtgcagtggcatgatcaaggctcattgcagtttccacctccccaattcaagcaatcctcccacctcagcctcccaagtagctgggacttcagacacatgccaccatgcctggctaatttcttgtagagataggagtttgccatgttgcccaggctggtctcgaactcctgagctcaagcaatctgcccgcctcacctcccaaagtgttgggattacaggtgtgagccaccgtgcctggccaatgataaatttcttaatttaaaaaactgtactgtggttatataagagaatttcctcatttttaggaaatatacacttgaataatttaagggtgaagggataccatgtctgcaacttacccaactaatagaaaaaaatcagtatgcatacataaaaatagagaataataaagcagttgaagtaaaatttaaacagtctgatgaatctgggtaaaacagacaggagttttttgtactcttttctctgaatttaaaattataccaaaataaaaatttacaaaaaaaaaaaagaagcatgagaaagcctgcctcttctagatgacctgaggaggtactactagggcggggcttgggaggcagctagagagcgagtgcctgcaccctgaggatgtgggctttcatggggctgggaagtctctttgctactctggcttccagccgctcctcagcttggttctacaatttgaagtcctgggaatgaggcttttccagctgagcagacagggctgtcagcagcaacactgtcaggtctactgtgagtctactgttgagagtctcagactcacagagtcagagactcaccctggttgtgagtctactgtgggtgaacctggactaggtgccttttcatgttatcaaacactgatgtaggcatgtatctatctatctttctttctttctttccttccttccttctttctttttttttttttttttttgagataaggtctcactctgtcacccaggctagagtacagtggtgcaattatacacatctcactgcagccacaacctcctaggcccaagtgatcttgtcacctctgcttcacaggtagctgggactacaggcacatgccatcatgcccagctaattttttttgtagagacaggatcttgctttgtcgcccaggctggtcttgaactcctgagctcaaccgatccgcccacctcagcctcccaaagtgctgggattacaagcgtgagcccttgcggctggccagaatcttgtttaagctttaaacaagtaacctgcttaaatatgtaggctcatcatttctgttttccaggtgaggtaactgagtctcagtgaggtgaggctggacctcttccaactctgactccagggatcatctacccccgccccccccaccccaagttccactccttgcacaggctggggcttccctactccgagcctcagcacatgctgctccctttgcctgcacacgggcccaccacatgtctctgcctattgattttccggcccagccaagactgaagttggggtctcctgcctctgaatcctaggttttcagggaaaattaaacaccagctgggctgaaatcaagctttgctttactgtgaacaagtcattttccacctgaattaaaaccaacccaaggggggagaggatgctagaaacacatttttgaagctgttttgagagacagctgccataatggaaacaaaacaaaacaggctagaaaaggggttggggggtgggagatggttatgcctttccttccctgtcagtgagatcattctactggtccccctctgggccctgctaccccacttattgggcctcagtttcccatttgtaaaatgagaaagtaaggcaatagcaggagttctcctccaaggtgtatgactgactcacttacgaaacctaaaatctatactccctggccccacccagtcagtaggccaaggttgggacttggccttttgctttttttttttttttttttttttaacaaagtcccacttctggtaggcacactttgtgctgtttgagcacctccagatagtccctgcaggctcttccatcactgcagtcctccgtcctctgaccagtgatcgggtggcagtggattcctgggactcactgaggccccttccccatgcccaccagttcctgggccacctcccgaagggccactttgcacctctttgctgtctttcaagaatcctgaccggcactcggcttctgacgactgataatgcttggaaactcagagtcacactcttgtggctgcaaattagtaaacctgaaagctcctcgtcaactcaggcgagctgtgtgagtgggaagaggccttagtttttgcaactgctgtccctgggggcaaactgaaaaacaaactgtatcacatcctgaaggccaaaggccacaccctcagccccagtggaggactctggggcaaggatatttcctggagtcagaggagaggagcctccatctgagcgccacacccccaccccgcatgggctctgcacttcctcctcagtggggacttgcttttcccttcttcctcatcctgtttctgccccaggccctggcccctcactgccagccccacactctggggaggaaagaccctttttagcgatgggactccgaaaagttaactgacctgtctaagcctcaggttccttatctgttgaatgtggccgtaatgcctcacactgttgttgggaagattaagtgatacataaggcatgggaagtgcttacagcagagcctgatgcagcacagccctagtaggctattagcgttattctggaactcccttcctgcctcacgggtgagctctttcccattaatcaagacccagctcccctcctttgggaggacttcccaggccaggctcctcaacagcctttctctgttgtctgcgcacagcacattttcccttcctaggctgcctccctcaccagactggcaggggctgagcttgttcatttgcatgttcccagacaggaaggctcagtcagtgctggtgggtgtgctgcagtggagcttgttccaatctgggacagggtaagtggggtggacagtggttgccccagtacagtaggcatgtgcctctggccacctggagggaccctacaggtatttcccccagcaatagtgaaccatcatggccaggtgctggaacatcccacttcagccatgggatgggtggacaaccctacagccatgggcagcgtcaagacagtgcatccaccgaggtctaaatggccgactcatgaatgcccttctggccataagctgatggcaggttgagaattactcctgcaggacagatgctcccctgcagaagggagaagcgtgcgtcacttgccctaccccttggaccagtggcaatgccatctccaaatgaaattcatggcaagggcctcctggctcttcgaatgtcaccaaagagctttcagaccctccttctctccctcttctttccagcccctgcccctcttcagaaggctggaagctctcgctttagattcttcctggataacaaattagaatcttaggaccctcagagtgcagtcccgccctccagcttggtgtcagcctcacctctgagagctattcccccaacaacgtcttctcttccagcccctgagaacttggctgaacttccttcaaaatggtgtttattcggccaggtgcagtggctcacacctataatcccagcagtttgggaggccaaggcgggcagatcacctgaggtcaggagtttgagaccagcctggccaacactgtgaaaccctgtctctactaaaaatataaaaattagccaagcatgatggtgcatgcctgtaatcccagctacttgggaggctgaggctgggagaactgcttgaacctgggaggcagagtctgcagtgagccaagactgtgtcactgcactccagcctgggcgacagagcgagacactgtcccaaaaaaaaaaaaaaaaaaaggaaaaaagaaaaaagatgtttatttgctttccatcttgcctgcattttgtccatttgtccatccatttattggtcaggaaaggctttcctgaagaggtgacatttgataagagggccaagggataaggagtagttagctgggccaaggcagggtctaggatggaacgggaagaagcttccaggcagaggggtgatcatgtgtgaaggacccgggaaagaagagaatgaggcagaatggaggaattgaaagatggtccaggaagcagtatcggaaattgagagaggcataatgggagttgaagttttgaagagtaggctgggaccaaattatgcagggtctgtaggccatgtaagggcaatggccattgtcctgagagtaatggaaaatcatggcaaggtgacagtgggacgttgatatgaccaaatgtggatctgaaaatgtcactctgctgtgtagagagcagacaggagtgagcagggttggtttcatagatgtacaactcgtgtaagcaaattgtacttggggtctaatgctctgagattgctgtcttggaattcttaatcacattatttttgaatttgcttttcttaagtacagtctggtgggacaatgaagcatacatcaaggacttggagccttggctcctgtggtcctgcttccaactgcctcccctggacttgttctcagtcttctccacttctgcctagcaaccactgccacactctgcccccagcagagacctgagtgcaggcatggggacagtccgggtcaagggcacacctggtagcatctgaggattggccatggcaatgtggcccctgccccaggctggcaacaccatggcaaattcaacaggcgactcagggggctgagcctctcactcacttctgaccctggttcctagtgcatcctggcctggattttgcaacacccctggggactgcctgtccgctgtgggttggtgaggcaggtccatgggaaatggcaatgcctggcttgacttccccaacctccgctggggaacgcagaatgcagatcagcgtggtggctgacaggaggagaagtccagcaactggtgaatttcacacagaactgagtcaagtcagagggtggggcggggcaagttgtcccacagatattcccatgcccaagggagtgtaacgttaaataacaaatcaaaaacaccattccaggttgagagagagactgcagtaaagaaacaagttttatagattagtacctttaacggcaattttgtccctgctttttgagtaagaggtctcacatttttattttgcactggactcgcaaattatgtagctgtccaggcagtgagcaatcagtgagatcaagcttgtgaaagtgatggaggtcctgtaaatattgatcctccttctgtggcagctgttgttactggttttgttgtttctgtggctcagagggatggatgaagtgtcttcaggagcggagtcctgccagtcagtggtgggggctgtgacaataaatgttataaaaactgattttgcattttattctcaatccttggagctactgcttcttgaattcttcaagcagatgtgttcagataccaggcaaaacaggcaggggctctgcctgggaggggtatgcccccacagcctggcctgaggcacaactgcacagacctcaaggcaaattgttttgaagcagctggaacagtcactaaaaagcggtgattttcagggatggattcctctccccaagggcctgggcctgggtgtgggtggggctggtgtgaataggggccccctaagacagtactcttttctgaggggcactcagacatctcagtcttgctcctccatctccctgacatcccaccaatccactcaagccccaccgcacctgccccaaccagacctcattcctgtaaaagtcatcacaatatcttcttctggtctcacccgctctgagccactccttatggagaaagaactccctagaacctgtctgtcagtctctaggcccctcagagcaaaaaccaagtctgcctccccttgaggccccggtcccagcaggaccctgcaggagttggtgctcagcagtgcttgtgtgcctgggctgaggagaaggttgtggtggtcacgtggttggctttcggcatccccggctgcccattcgcaaggccaaccatggggaagtatgagcacgtgacccacctagggccaaggagacacaagggaaggtctcctggggagctgggcagaagggagggtgcaggggctttggagaaaatgagacacaagggcaggtgtccttttctttctctgcttgtggctgtgtctggagttgtagatgagctgctgcagctccttggcctccagcccaaggaggaagatcgtaaatgcaagagaaactcagagagactgagctgaagccctcatgtaccacagctggaggctgccctgcctccagccccgttgtgtagatgacagcacacgtcctctgtgtcagaccctctggtttatgttctttgcagccaaaagcatcctcaactgatgcgaataacacagtgatgcagaatagcatgtgctaaaggctggcctctcattcctatggcaccatcagccccggtggcttccctagattgtttttccttttattgacttgggtgagagggtctcgaggtagaactggagaaaggaacaatgaaacgctttttgaatagagggctgttagtaaaagacaactgtggaagttaagagcgtgtgctttggcttcggacagatctaggaccaaagcccagccttctgcttattgcctgctacttgggtgcgttacttacactctttaatcactagtttgcccctctgtaaagtggggataatgacagtgtaactgaggtggtccgtgtgaaaagcagaatgatgtacccggtgctgggtaagtactccaaagccgaattggctgtctggtcgcccagcctggggacctgcaacaggtaagggtggaagggaggggaggaggaaggcctctctagtagagaattgcagagtctctccagaggttcctcacattacttccttccccagttgctccagcccgtcaccagcatggccctccatccggggctgccctggctggacaggtacagttgggaaaggaaggcctcatgtgtgggagccttgaggttggctttgagggtgggaggatttgcccaggtaaggaagatcaaggaaggcttgccagaagggaggctgggaacagagcaggtgggagtgggaaaggtgcctccagggagagggaagaggcctggctggagcagaagtctctgggaggtgatgggaaggacacctagagaggcagggcagggagcccagctgtaaaaatttctgccaataagcaggcaggagccttctgttaacagagggtctctagtctgctccagacctagaggcatcatcccatctgatggatggagaaactgagctcagggaggctgagccagtgctatcagaggtggtggtgccattgggaggtgaggtgcagcctggctcactctatggcctacaaagttcaaggggatttttacactattaattgtcttcagctgcaagtaacaaaaaacctgactggggcgccttacagattaaagattagctcaaatccaaggtttctggaggtgagggccttctgggggcagtcccattgctctgcaatcctccccaaagtgtttcctcttgggtggctatttcagagcctgggtgtgccccctctctctaaaccctgggcatgcataatgggcacttgggagctcaactatttcatctgcagcagctctcatcttatcaccccgtcagctgtaaggcagacatcagtgagggtggtgatttgcggacaatccctgactcaccccattttgccagcctgccctgggctcaggacttcctgctgcatcttctgctgagccggcagggcgtggcgtctcagggctggggctggggctctagtccagggctcttcctaaggtggtaccacacagtgcccccagcacctgcccaccaaactggaaattccagaaatattctcgacaccgtctcctttccaaagactgggtgtggcagatgaggaagctgaggctcagcgagttggggggtctattaaggtccctcagcccctgaaaggtggggtcaaaattaaacaaaaactgggcctcagactgggtttccaaacaccccactctgtgccttgataatcctgtttctctctccatcccttcccattcactgagccggaagcctccatcttcagaagggggttctctgccccaaacagcgtctaatctggagacttgcggtggtggcggtggtggtggtgggggcagtgccggggcctcaggctgttctccctcatcttgctgcctgctcaccttgcctctgtgtgctcacagccccccagagcacagctgtgtctgctcccagactatgggctccttgagggcaggacctggtttgggtcccagagcagccagggtttgatgaatgacagatgccctagacctgggtaagcccctccagaatgacttgctagtgcggggtggggagtctggcatctctgggcccagcctggaagggtgctggactggctggcgggtgacacacctggggttcctgggcccctcctggccacactgtcagtgggcctcaagctcccttagcatatggcctctggaataaagtgagcccgcacctcgggagggggcaagcagaggcaggagcaggatggcaggtggcaggcggggctgcacaggggagcacagcaactccacttcctgtgggcgagggccctgtgcctgccccgggggaggttgcacaaaccttcctgcgcaggcctcgggctgcctgcctgcctgcctgcctggcccggcccgagctccagcctgcctcttccactggccactgcctcccacccagggctggcatccctgctccctgccctgggtcccagactgtgtcctccatcaccgcagggtcggtgaggggctgggctggacaccagggcccgccctcccatcactgagctccactccttcctcattttgctgctgattctagccccaaacaaaacaggttgagctttttcctcccctcagaagctcctctctggctcgtggctgccttctgagtgttgcagacggcgccggccgggaaggggggcctgggccagccctgccaggactgggacgctgctgctggcgcctggccctccatcaggccagcctgtggcaggagagtgagctttgccgcggcagacgcctgaggatgatgccccagctgcagttcaaagatgccttttgggtgagtgaggatggttgggggcactgaacaagtggagggggcagagctaggctgaaatctccatgcaagtgatgggatgcggctccgagaggggagctttctcataaaatagtggttgattcttggtcttaattgtcatggaggtggcccaggcccccaccccttctggactggaacgcaagtggactccgtgaatgagcgtcctcctctctgctgccccgtgtgttttctcctctgggagacctctccccacagcaggagctcctcagaagagggtaacacatgggtgggggcttgaggaggatgtgtggggcagcaaaggaggggtcacagatttagagaccagacaaacttgagttcaggtcttggctctgttacaggctgggcaagtcatttctgtctccaagcctcagtctctccatctatataatggtgataaaatagaaatcaacacaccaactaaagcattggatcagcaaggggatccaaggcactaaagcccccagcaccttgcctcactccaaatggtaattctgttcccctcacccagccccttgtcccttgcagaccttaggggtccttcaaggaggcagccaggtgggcaatggcttgcttactttcttaaattcaacacgggcttaaatcaagtcatttcccccatgaaataagggcgcccagccagtggtagaggtaaagtggcttggcccgggccacgtagcctgcagcccagcttggacccctggtcatctcagcacttttccagctgtccttcaactacccctctgcccctcagctctggctgtgcccagggctctggggaaaaactgagacctctctggttggagctggggaatgtggctgtcccggggtgctgcctccaaccccgaagaggacgctctggccctcggctcagccggctgagccccagccaacagccctgccctccccgggccttttcctggggctgcagccaggaggatgagagctatggagccaggccttccttcccttccggccggctccacttggggcctgtggccagcgtgtgagtgttctgcttcctctgctctgactgtacagtaggcaaaggaccccacgtggggagggcaccttgtgcctttctgggcctcagtttccccatctctacaaagacagggtgggcccagcccagagaagccaatggaggcagagctgcctcagcccatccggaggaccaggcaccaggatgctcagggcccaggctggcagctggagccctgggggatgggggatgtgagtcaccacctagctgccctgccttggtgtgcaaagttgggggaaggggtagggcctggaaacccaggccactctgtagcccagggcaggccaggaccccttgactattttatcactgagacctctgtccagtcctagagcccctgggcctgccttccctagggcagagctgggcaaggagcagcctccatggcaggatctgggcacaggtaggggtggcgtataagggagcagggtatggcagccgcagcagaagcaagcagccagcccctgtggagcttcctgagcggcatcctgcccacactctgtgctcgtcgcacctctgggcttcctggcctccaagtgccttgtctcctctgtgtctggctccctgagcctggggcgggcatatagtttccctagggaaggccagagcaggaaggggagagaagtagccagtgggaacctctcacactgagtctgggccgatgccccgaaaggtcactgtaggcatcacctgccccagggctctggattctaatacctcttcctgatgctcagcccatcccagtgcataacaactaacatttgctgagcacgaaagatgtgccaggcgctgttctcaagatgtatgcatattcactcattcaatccttcaaacacatgctactgttatctctcttattcagatgaggaaattgaggcacggagatattaagagacttgcgcaaggtcacactgctgggattaaacccctggcaggctggctttagcacttgtgttgttgcaggatccctctgtctatctgacatatcactggatcttttggcttcgggataagataagaggtaacccctcttatctcccagaggggtaagaaaatcagacaaggtggctagaacaatattctgaagcttcatttgtagacaaatctgtaaaacagaaaaggcacactattctggccacaggtgttatattaggaacagcccagccagcttggcccatgtctgggccttcccccaccccagcccaaggcactgtcattaaacccttcagcctgccagcacactgtttagaaatgactggtttttaggcggggtgcagtggttcacgcctgtaatcccagcactctgggaggccaaggtggatggatcacttgaggtcaggagttcaagaccagcctggccaacatggtgaaaccctgtctctactaaaaatacaaaaattagccaggcgtgatggcatgctcctgtaatcccagctacttgggaggctgaggcaggagaacagcttgaacccaagaggcagaggttgcagtgagctgagattgtgccactgtactctagcctgggtgacagagctgacagagtggagggaccctactttggctaaactggaaagatcatgtttgatatcacagcccctcagttattgggcaacctcacccatacagaacacggggcggaggaggggagccagccctgctgtttctggctttagctcacagtaagggaggaagcaaaagtggtttctcaggagccaaagatgatttccctaagagctttccttaaagctcatatactacactcctaggagatgtcccctagcttttactcaggtcctatgaactctaatttcacccacaattttaatgagcttggtcatggggtcttttagcctatagatgtagcaattagtggcagtctgcacagtacctgatatacagttggcgatggataaatgctgatggacctggactacgaaaggacgtttcacaggcagctagcagcctgattgcaaggaaggagacagaaacagtctgaaaagcagctgtagtggcacagaagtagtggggacactcagcatgggagcagacacagtcctgtccctcagtcggcctgtttttgcaattttgtcagtgtggccacacagtatttatttatagcctgattttagctgcagccgagtgttcagatgcacgctgctgtaggagtgaggcagggcggaccagccacagagggagggaagggataatgtgatttctgtgatacacacagatgataaagagcatcacaccttggcaggaagtttgtaaatgagcctcagagtgggacctgtcagtgagacaaggttgaatctgagaataccagctgtctgagcggagagggcactggcctagcactgagtctaaggcgctgggaagcccagagaaggaagggtcctccccctgcccccagtttgtcgtggctccactcccagcaggtggccaaattattgcaagaaatgtctgtctgtatcctctgcacagggctgacaagtggggtactggctgaggacgtgttcatagaataaatgaatggacagtgaatgtctccatggtccatctcccttcctgaacccattttttacttcatttcacttttttttttttttgagaaagaatcttactctgtcacccaggctggagggcagtggcacaatctcagctcactgcaacctccgcctcctggggtcaggtgattctcctgtctcagcctcccgagtagctgggattacagacgtgcgccgccacgtctgtctaatttttgtatttttagtacagatgagatttcaccatgttggcctggctggtctcgaactcctgacctcagatgatccacccgcctcagccttccaaagtgctgggattacaggcgtgagccgccgcgcccagcactacatttcacttttgttatattctgcaaatatttggtgagtagggctgtctactaggtggtccacgctggacccctgagcttcttcaccctgcaacatctaatcagatgaatgaaactgtcttgacctgaaggaagccatagttcagtgccggggctggaggaataactgggtcaggcaaggagtgctctgagaggagcagtatctcaactgtgccatcctctcccaggtcccccatcccccgcaacctgtatgtctatccaatggcctttgcaaagatgtcattagatattgttttaagagggaaaatctagttctggaccagattctattgagatccacatcctattccttttagggtagttaaaaggaaaagtaaggacctggggaggctgggtcacatgcactgcagtgactgtcacccaccctttgggtgggaaccaccaagggggtatggggacaataggcctgaactttccccttgacatgtgggtgtatctctcctttgaggctgggctctggctctatctagaaacccctgtgccacactgggaggagctgagcctccccaagcccatttaacaggtgacagcaccgctgccgagtggggcagtgactcaccagcttcacacagtgggaccagctgggctggtctgccccttccctatgtggcactcagccactggtgccttttcccttcccagttctgagatgctgaggtgcccatttatgaggctacagagaaggggactgaggggccctactctgatctgtcataaagctgcctgtccctacccccagacctgtctaccatggcccaggggcatcaggagagcctgacatttgctgggcacctgttccatcctgggcatttaaagagatatatatatatatatatatacacacacacacacacacacacacacatacacacacacactttctaaagaaacaaaatcaactaatataagatcctaaaaggaaagtggggaaatggagaaaaataggaaaagaagaagcacctttagtctcatcacacaactgctaatattatgctgtgtttgcataagattgccttacataggtgcaagcatattgtgtacataattttgtattttccctttcttttacaaattttttatttttgcagagatgaggtctccctgtgttgcccaggctggtctcaaactcttgggctcaagcaatcctcctgccttggcttccagagtgctgggattacaggcgtgagccaccatgcacggccctccctcctttttttttctagtattttaaattttattttaaattgtagcgaaatacacataaaatgtaccatcttaaccatttttgtggtgtatggttcagtagcgctaggtttgttcacactttgccaccctcccctttttttagcgtaactcactccatcgggaacacctgtgggtgtggacatgggttcctcattttcagcaacaccactgttcatggctgcacagttctctagcttgtgaatttggtgaccatgctgtgattttttttgcccagtcctccactgctgaacatttaggttactgccaattatttattattctggacagtgacaccatgggtagatctttgactataaaggtttttcacttggggattatttctttgggcagaggaggctaatggctattttccagggaaggaggcatttctgggtgaaagagtggggccagttctccagccatgggtactagcagtcactttgggatcccccatagtcctctggttgggcaggagctttttcacacaggaaggagggaccccagaatggcctggaagggtcagggcctgtggatggggccctgctggaaaccagagcctgcactgactttgtggaaggccttgcagcccagcaaactgctgtggctttgagggccaaggaggccagtggctgaggagtggccctggtgcactcagagcttgcagacagtgcaggaggtgggagagagaggccctggccatcctgcctttgctgccaccaagtaccttcccggcacctgcctggctgcatctgtcagaagcagtgaggacggaggctctccctttcctgattgggaaagctctttaagacctggtgttccctgtaaaaagcagagagcctggcagtgcacctggtcggcaacccgttgtgaaaagtggggaaataagcatttatactggcgcaggcttgtagtattaacaacaaaaatctgtggacggatgcacagggagctaattaaagtggttgcctgttgggagaatgagagaaaggagatggatgagggatgaggctgagcggctgtgaacgttttcaggattgatgtttttatactgtttgatttttgaaccatatgaatgtattaattattcaaaaattaaatcaaacaattaaaaatgaaaaagaggacatttatttcaagtcccatgaagaatttttccctgaatcccagctacttacatcatcccctgaggagcagcaatgctgccatttgctgagtgcctgttccatgccaggcatgctgccattcagtccacatgcccccaaacgcattgtcagtgtcttcctgactctgtgatgggacctaaggcacggcaggtctaggcccagacgagggtcacctgtgcagggtagagcagggactcccacctaggtctgtcgaactctattgccctctgccctgaattctagagagtttgttcttgcttctactttaatttgtgtaggatgaaaggatgcttccctacatgttaacactggtgtctatggatttggaagtaggattctctccatcccccatctaattttctgcaagtcaatacagagtacctttgtcattaaaaagaaaatatttaaaaagaaaactaagcaattcctgctttcaagaatgagttggtgtttctaggccaaatttgtggtttgctagcatgcccttttccacatgctcggtgcatattttgtggtacgtgggcctctggggaccaagaacttcgttcatctgtgcccattccacaggacgtggccggctgctcaggtgttagaagattgcagaggtttgtggtcatgcttgctttgcttttgcgatgcctgcagatggtcactgccaggatttgctggctgcagggttctgggtcgatttggtgttctgaattcaattttattcttgataaaaaacaagatctgcttcttgatgacccactttgtgctccagtcccctggaacccacatgcttttcctggctgctcctgacatctacacagaactagggcagcccctgggatggagaaggagggccttgctttgggctttgaagggtgggtgaggatttgagacatgtcaggaggacaaacggcactcaaggtgggaggtacggcatgggcaaaggtgtggaagggggtttggaagacagttttctggcccagagcattgtgcaaggtgactggtaggaagggaaggcacgagctggattgtgaaaggtctctgccctaagtggtggcagagatactttcttctgcctctctgcaccctctctggtggtggctgtttcctctcatgcaaaagaggacagaggctgcgggctgtgagtgggatgcccttcctcctcacccagagcctggctgacgctgcaaaccacatgatggagggaactttgggtggaaaccaagactgcctctgcttccagctagagagcatgatgccctgggccctgggctgcccacaccaggactctcctctgggttggctctggaaggttcctccctcacagactcagtcatgctccatcctccaggcttagaaggaaatcggcttcttgggaggccgaggcgggtggatcatctgaggtcaggggttcgagaccagcctggccaccatggtgaaaccctgtctctactaaaactacaaaaaaattagcggggcatggtggcgcatgcctgtaatcccagctactcaggaggctgaggcaggagaatcgcttgaacccaggaggtggaggttgcagtgagctgaggtttcacaattgcactccagcctgggcaaaagaacgaaactccgtctcaaaaaaaaaaaaaagaagaagaaggaagcgggcttctttgaagcctcacccaaccctcacccacacttgctaggtggccttggagaatcattttccctttctgaacctcagtttcctcatctgcaggatgtcagggtcatcatcacttaagataagggctttgaggttggggcggctcagggcagtgctaagggaccacctcctgctcaccacagtggagtagcagaccaggaacagttcccaggggacccagatttataattggatatgcacccatagggtgagccttatacatagatcttgctgtttcagaatgcctcctccaatcatgttcaccattgcatgttatactccaccattagagaatcattcctttggtttcaagtaacaagatgatctatgttatctcacttaattccaacaatagtcctgtgaggtcagtattcttattcctgttttacagagaggaaactgagcctcttggaaggaatgtgggcctgggggatgccacacagatggatcggactgggctgggcctggatgccaccttcccaggtctgggtcagagagccctttgcagttaatgggagggtgtgttggtttgctgaggcctggcacactgagcaatgggtgatggaacaggcaggagagcgacagctccttccactggtgttgacaggccacccaccattgggcaacaggaagtgccagctggagccctggagaccagcagccagtgtggggatgtggtggccagatggaactcagggcttcccagctgtggaaacaggaacgggaaacagccacactggggaggaagtcagggggtgatgggctgaggcaagagcatgcctgcgtggctagagagagtgaccaaggtggagagtagttggagataaggtaagaaatagaacagtggccaggcgtggtggctcacacctgtaatcccagcactttgggaggctgaggtgggaagatcacttgaacccaggagttcaagaccagtctgggcaacatggtgaaaccacttcttaaaaaaaaaaaaaaagtacaaaaattagctgtacctggtggtgcacacctgtagtctcagctacttgggaagctggagtggaagggtcacttgagcccaggagttggaaactgtagtgactgtatgatcgcaccactgcactccagcctgggcaacagagcaagactgtctcaaaacaaacaaacaaacaaacaaaaaaaacaaagaaagaaaagagaagcagagagccagatcttgtaggactgtcattctaaaaaatcccaatgcccaggccacaccccaggtcaattacaccccgatttctgagggtaggacctggacatcagtatttttcaaagttccccagtgcctccatgtggaactttagcttgagaggcatcaacatagataattgtggtaattaattaccattgctggccaagcatggtggctcatgcctataatcccagcagtttgggaggccaaggtgggcagatcacctgaggtcgggagttcaagaccagcctggccaacatggtgaaaccctgtctctactaaaaatacaaaaaatgtagccaggtatggtggtgcatgcctgtaatcccagctacttgagaggcagaggcaggagaattgcttgaacctgggaggcagaggttgcagtgagccaagattgtgccactgcactccagcctgggcaacaagagcaaacactcaatatcaaaacaaaacaaaacaaaaattaccattgctgacaataggcatacatctggtttttaccattttcctgacctcatttgactcacctgagtgagcagaggttagaagttttgggggtggtggtaattatatgtaacataaaattgaccattttaacaatttttaagtatatgattcagaggcattaagaacattcactatttcctgaactgcttcatcatcctgaacagaaattgtacccatcaaacaataactccccaccccttcaccgcataccttgttctacctcgattctactttctagctctatggatttgcctattctaggcatctcctgtaagtagaatcagataatatttgtccttttgtgtctggcttatttcagttagcataatgtcttcaaggctcatccatgtcatagcatatgtcagaattttcttcctctttatgacaaaatactattccattctacgtatatactttattttgtatatccattgatccattgatgaccactgggctgtttctttgagctactgtgaataatgctgccatgaacattggtgtacaagtacctgtttgaaaccctgctttcaattcttttagattatacctaggagtggaattgctggatcatatggtaatcctatgtttaactttttgagtaaccgccaaacagttttacattcccatcagcaatgcaaaagggatccaattgctccatatctttgccaactcttgttaatttctgttttttttttaaatcatagccaccttaggaggcatgaagtaatatctcatcgtagttttgatttgcatttctctaataattaatgatgttgagcatcttttcatgtgtttattggccatttgtgtaccttctttggagaaagtctatttaagacctttgcccacttttgaattggttgtctttttattgttgagttgaaggagttctttatatattctagatactcatcctttatcagatatatgatttgtaaatattttctcccactctggagtgtcttttcactgttttgatatacaaaagtttttcattttgatgaattcaatgtgtctactctttgttttgttgcctatgattttaatatcatatcagagaaataattgccaaattaaatatcatgaagctttccctatgttttccttttaaaattttgtagctttaggtcttacatctaggggttcacttcatcttgagttaatttttgcatatggtataaagtaagggtccagcttaattcttttgcatgtggatatccagttttcccagcgccatttgttgaagtctgtccttttctcatagaatggtcttggcacccttgtcaaaaatcaattgaccatatatgttagggcttatttctgagctcactatttccattctattggttatatgtctgtccttatgacactaccgcactacttcaattactgtagctttgtagtaagctttgaaatcaagaagtgtgagtcctccaaacttattcttctttttcaagattgttttggctctttgggggcccgagtagagctgcttttgttgttccctttttataggtgaggagactgaggcctggaccctcctgagtttgcccagcctggactggccacgagtccgtgacaaactcctcatcatactctcaccctgggcatgtgtagggagacacttgctttagagggcccctgggttgtgggctcctccctgcgattgctctgccttacagctccccaagaaggtccatctatgacatctcggcttccttgaggccccacctgctctcactcttcttcaaggagggtctggagggaaggcctggaggctgggtcaccaacttcctcagtggatcaagataagaccctgcaaggaattaatgtctgtcccggcctcagcttgcctggataaaaatcagacttctggccctgtgcagtggctcatgcctgtaattccagcactctggaaagctgaggcaggtggattgctcgagcccaggagttcaagactagcctaggaagcatggcaaaacccaatctctacaaaaaatacaaaaattagctggggcgtggtggtgcacacctgtggtcccagctacctggggggctgaggtgggaggatcacttgagcccaggaggtcgaggttgcagtgagctgtaatcatgccactgcactccagcctgggcaacagaacactttttttttttttttgagatggactctcgctctgctgcccaagctggagtgcagtggcannnnnnnnnnnnnnnnnnnnnnnnnnnnnnnnnnnnnnnnnnnnnnnnnnnnnnnnnnnnnnnnnnnnnnnctaatttttttgtatttttagtagagacggggtttcactggttagccaggatggtctcgatctcctgacctcgtgatctgcccgtctaggcctcccaaagtgctgggattacaagtgtgagccaccgcgcccgactggcaatagaacactttgaggactgcagtcactgaagcagaagggattcccttcttggtcacctcctgaacaattgcccattgacctggaccagctctgagcccactctcctaggcatcaggacatcagactacaggtggtaggaagacccagaacagctgaggatggttcaggcaagcagagctgggggtggagggcgggagatcagcacagaagtctggatcagtgtccctggagctgcagtgaatactaaacgcagccaggtgtgaggtctgcacagcacagggaagcacagggtgtgggtggggtgtttggggatatctgtgaggattctcactgaccctgaaaccaaagaaacaggtgtggctggtgccaggaccaagggaagaccagcagctgagcctgggtctagggtcagagcaggagccgctctgaagctgcagaaatttcatccccgtcctcagataactcccagtcctcaagggaaggagcttgcactcagggtctggcagtctttttgttttgtttgttttttgagacagagtcccactctgttgaccaggctggagtgcagtggcaccgtgtcggctcactgcaacctccgtctcctgggctcaagcaattatcctgcctcagcctcccgagtagctgggattacaggtgcccgccaccacacccggctaatttttgtatttttagtagagatggggtttcatcatgttgaccaggcttgtctcgcactcctgacctcaggtaatccacccgcctcggctttccaaagtgctgggattacaggcgtgagccactgcgcccagcattcttgatctgagtcctacctctgtgtaggctgagagtaaaacgttaaatagtgagtggtcccagagagcactaggctcctcacacagcccccaggcctggggtagggggagcatctgactctaagtagagtcgtgtttctccaccatgcggctgtgtgtaacatgtacactggctgtgttgggcagagcagggcgatttcccagactccaacatagaagcctttacttggcaggcgccatctttgtctctcactctgaccttggagcccagtggcccgcttcgatcctactacactcatgggtggtcctggggagcccctcaactctctgagccttggttccttgtttgtaaatattgtagtagtaaactaactttggtggttagaggattgagagtggagacatgcaggttaatggccaagcaaggataaggagccccacgtgccatcccctgcaggtgtggagtccaactagccccccaggcacggaaggcctcaggctcagctccgaggccctgaacctgctgaggatggcagagagagccaaagggcctccagaggctgcaggggtccctgccttcaaggaagggcacgggcataggagtggagctcctctgaagctctaggggcccatctctgtctcttgagcaagtcccaagcccaggggagcctgccagccctcacacctacagcaaatcacagccgcaaagcaggcacctcatatcagccctataagggcttaggagtccacgtattctccccaatttacagatgaaaaaattgaggccagagagtgggagccactagtctagagaagtgtcccagctaggatcaaacccagttctccttgtaaacgccccttccctgggctcctctcagttaacatgcatgaatcccctcggctgcccttccaggagcccggtgagcgtcaaatgccctgcatgaggctcctgcaggtgttgtccattcagtcctcagagcccctggaagtgggtgatgctctcatcccgatctcacagaggaggaatctgggctcaggaggtttgtgactcatgcagactgtgtggaactggccagaaccagaacccagtgcctgagccctgtcacgccccactgcctggactcgctgtgggcctgtcctcccctgggacatccctggcaggcgtaggtggtgtgggagggcaatgcctggggacggggatgtgcaatgacagtgcctggaccactggtgcccctggctggtcactcacaggcgggagtccattcggcaaggagccgtgctcttcctgtgaagacgcctggacccctcctggctggctacagggtcagtgcctcctccagggcttggggtctggggtggctcagctccatcctcccctgcatcagtcacccccaagggcccacggcctcccttcctcacttgccctcactgtcggcctccttcctcgcccactgctggatcctagtgagcctccaactgccaaatcagcttggcaggggcggtacagagctgtgtaacctggacaagtcactgttatcctcacttccttgtctgcctgtaagatggaacagtaacagcacagtactaacttgacggggttccctgaggactggaggggatcatgcgtgagagccccaccaggcaccgcacactcaatcccttcccctgaacctggaacctggtcctggttcctatgacctcctgggaaggtcctgccctttgctgtgtgtgacttggctctcctcagtctggcctcaggccaccttacagacacctgctccatctccctgcacctgtctctgctgccttgaagcaggttgcacaggaacagcactagcactggacttccaggcagctgagtctgaggggcgtgtctccatctacctctggccgccttgtgtttgctccttgcctcctctctcacttttcttctcttttctatttctttttcttttgagacagggtcttactctgtcacccaggctggagtgcaatggctcaatctcggctcactgcagcctctgcctcccaggttaaagtgattctcctgcctcaccctccgagtagcggggattacatgtgcccgccactacgcccagctaattttgtatttttagtagagacagggtttcaccatgttggccaggctggtctcaaactcctgagctcaagtgatccacccctctcagcctcccaaagtgctgggatttcagttgtgagccaccacgtccagccctctctctcttttctgcatgttttggtttcatgacacaggagaaagaagtggggattgggctggccccatgagagtgaaggaggggaagcaggcggggaactcaggcagtggggtgctttcctgcctcatcattgagaaggcctatttaaaagaacaaagctttcaagccagacagaccttggtcaaaagccagacgccccacaacattagagagagtcacctctcttgtcttcaccttcctcatcttcatgacagacagtagctgcctcgtggtcagtattgctgagggcaggtaccacactcatgcacagtgtgtccttgtccagtgcctgtgttgtcccttcagtgggacccctgggagtccctggaagctcacagggctctgatggggtccctgtcagccacgggcctgtgggcctcccagcacagtggagcccagcccaggcatctctgggactcggccagctgggctgctcaggtgaggggccctgtaaggcccggcagaggccatcagactgggactcggaggagaactgtggcactctggaaactcatttctaatctcaaggtcctgtcagcccaggtgaacaaagagtcgctcatctgacattaatgcacatttgttctctaaaaactaaaagtctgtctttgccttcttggccctctgtcttcaacacttaccctgggccatctcagacagctgtaagtcatcctcatcccatatttatttgcttatacatggatcgcagcagtacttgagtcaggggacccctagacaccaagtccctagtttaacaggccatctgaggcttgagtcctctctgtggaaccagacctgcttacagactgtagtgatgggcgctcctcacctgtcaaagccccccaccctctttccatacctacagccattcaggctcctgggaagcctttccttgcattgtcctggagttggcctccctgtctctgcccccatgagtcctggcttgggctgggaaatgccagccactagtgctccctctgcttctgatggccccacagagatctccaggtgagacttttcctaggccattccctcacagctttggcttggaactctcccttccctccctatcacctcctcccaaatactctgggtaagcaaccgccttgtttactgagggctctggccatccatccatccatccatccatccatccatccatccatccacccacccacccacccacccattcacccatccacctgtccatccatccatccgtccacccatctgtccatccatccatccacccactcatccatctacctacccatccactcatccacccatccacccacccatctacccatccatgcatccacccactcacccatccctccatttgtccacctgtccaccagtccacccatccacccacccacctatccacccatccatccatccacccacccacccatctacccatccacccatccatccacccacccatctacccatccacccatccatccacccacccatctacccatccacccatccatccacccacccatccatccatccttccatccatccattcatccatccatccatccatcaagttgtacctgagtgtttggtcctttgcctgcctcactttgccaaccagtaatggtggagaggagtcccactgtggggtactgactgtagggcggtggaaggagcctggttgctacccattgacttagcatccctgtgcctctgtttccgtatctatacaatggggatgataattcctgtctcagaggactgttgtaagaagtagaggggaccagtgtgactggcttctttaaaggtgctgggtaatgggtcattgaatctgcaagcaaatgatctggtcccctccatggggcacctcaggaagcagccgtcataaggccttgtcctcttgaaggcctcactgaggcgcttctccagcccatcactcagcatgtctgtgagcagagctgtgtgtaggcaccaggtgccgggatccagtggggaacctgaaagacccccctctgcctccatggagctcagcccttcctacctcaggttttcagtccacagaagacaagcaacaggaaactaggtgctagcaaacccacagtgtcagccacactggctgcagatgtcactgctggtgtgagggaggagagcaccccagcaccatgcagctccatgcagctaccttccaaagctgctgctacgtcttgcttccccacctgtggcccatgctggagctttcccagtcatcttcaggtgtaacccaatccagtccaagctagtatcacaatttcactctcattcaatttaaagctccccagttccccgactttcactggaagcctctgatggggaaaagagaacagggtcagtttcctcccttgccatggggtacccacactgcactgccagctgcctctggggtctccatgggggggtggtggggcacaggccgtgactgtaaaggggagaaacatctcattgccctggtactgttgtaactggtgacagtgaatgcacacaggtcagccctttctctccctggcacctgggcaggttttttggtgaccctgcccccctggagtccctgaccactccgttccctacagccttccacttccaacctctcccgttgcacccaatagtctgctccactcagcttctcctaggggctcctctctccctgtcaggctattctcatggacagaattaccaggcagctcttcctggctaccttccacggcccccacttggttcccagggaagattttggtgccagttcttggacatagcaggtaggaactcggaccaaaacccaggtgtccccctccaaggttggaggcttagctgtcctctgatagatgctgtattctggagtgccaggcaagggagcatttgaaaaaggctctgctcccctttaaatggaacctctggtggaggaaggtgtgtagggcgagaggggaggtgatgaggtgactcatttcttccagcctggccccagctgagggaaggtgtttctggtcggggaggtggcaggcaggcggggagggctcggggagctgctgcttgctgaactgcccctgggtgacaggccctgagtgtggggctttgcagagaggcaaagtaatgggaagttaacagccaagatcgtggcttgggatatctgggttatatcccagctgcacccggcaggtccctgggcagattgggtaacctctctgggttaccttttcctcatccataaaatggtagtcatcacccctagcccagtatctgccttgtggtgagccctgatcttgagtccactgttctcacctatgcgcacgatttcacttgcttctcgggtcacctctaggcggtgagaactattaggcccattttcacagggaaggaaacaggctgagaagggccagggtcacgggaggtgtgaacccacatctagtcagtcagacccttcccagcctctcaaacaggcccgagtaccctctctgacctgtggcctacactaacaggactgtgccctagaggggcgggctgtcagggcccgaaagggggttagcctcctgcccccactttcccaatgaggaaaccaggtcctgagaagtaaagtggcttgcttcaggccctggtgtctgtggtctcgcccctgcagccaccaagagttatgggcgtgaaaagggggaagtggcggtagttacagagggtgcttctccactcaagccgtgggggtgtggagggccctggccggctcacaggcctgggccgtggctcacaccaacacccaccagagaatgaagccagtaggctgtccctgacagaacagggcacccaggccttggccacactgcctcaaggcagaggcaggaatatgtttcctcccaagagcctcctcctggagttctgggatgccgcctgaggccgatggccacacaccatggacggcgagggctgggtcccacatctggctcaagtgagcctcccagaggaagagactgtgcccgctccccacctggcacccctaatccaggacgggttatcctgggtgccacatggctgggccgtgaccactggctgttcatgggttacccagagccgcactcctctgacccagcctgggccccaggctagcctctgtgaatccacagtaactgaattatagcccaaaatacagctttgatttgaggtggagataatttgagtaatcattttcaagagttattttttcaaatcatgtttggatgttccaaaatagaaaatggttcctgggctgtctactaaatggctgatgtaggtatatggctttggggacaggttgacctgcattcagatcccaaactctgccctttacccattgagtggctttgggcagtctctttccctgtttgggcctcctgtccccatcttcgcctcccgagatctgtgttgtggtcaggaagataacgctatgatacccttggtgcagtgtgtgccaggtagacttgataaatagagatttcacaaagggcagggccacaggcagcattcggatgacagaggttggacaggatgaggggagatggaggtaagaggagtgggggacaactagggtaggtcccctgggggtgatgctgatgctgggtcttgggtggcagacccacatgactgattaagttacaggatgattggttcattcatttcctaaacacatcctgagcctgactgtcccagctcagagcacggagtcagacccatgccctcgaggaagtggcaggggtgggggtgaaggaggagggcgcgggctgggggaaggggtgcagggctgggaggcatcgtgagcagcccctggagagtcaggcacttcctcggaacatcccagtccttgtgacagtagctcactcggccacagcccctgccagcagcccaaagctctgagcgggggactgggcgggatcctggagcctgcagcctctggggacttgagcacggcggtcacagcctgcagggcctctcgctgctttctgactcctcccgaatggccagcgtaggttcggtttgcttctctttccactctgggggcctccataaggacaggagaagggttcccttggcgtcagggctgggtgtggggctgggctccaggtggcctctccagaggtatcaggaaggaatgacaggtcccctgagagtccggattcttgtcctgactctgcagcgtcaagcaagccatttccttctctggcctcagtttcctgaggagtgagggaagccgcacaaggtggttcccagttctcagggcgggggggtctgtggcattctgacatgaatgctggtgtccctccgggcaggtgcaggaggctgaggccccagatttgtttttcttcccagccgccaggagctctgacctgagggtctggagtgagggcagaggctgaggggtgggaaggggagggctgctggctgcaagcagctgcccaccaaaaccacagaaatggaagcctggtccaagctaacccagtgatgtcaacctggacatgggggtgggcgcctgcctctgaggctggggggacagcttctggccttccaggctagacacgctgcttgttgctctgtggacagctgagcctggaccaggccctcctcaggaatttctagggatgcttatggagggggtaggagcttggggtcctaagtgtcctacaggccaggagagtccacctgctgagggtgggctggagtttgtggggagggggggcactgttggggcaatttatgccattgctacccctacttcagattcttcttagaccttggagaataccttctccttccagcacctgactcaaatgcctcttcctgcagagagctctcctggatttcgactccatccctgttcccctcacacccctaaggtggcatttgaggggagacatgggtcaggggaaggagtaccaggctttacctgagtcatgtgtgtgcgaccctggagtgtgcgtgaccttggagactgtaatgtgtgtggtcaggggagctgggacttcttcctccagtctctgaggctttaggggtcctcagggatagaaaggaagacagactaggtgcggaatgtcaggcctgccttggtgcagttggtgacaaaaatcctgtctccccagcacctctcaagctcccctggagtaagcctgcgtgcagtgcctgggagagctcagggggttgtggcggggatcctggccccgggacccactccccaagcctgggaatgtcctgggagacctctgttccttcatagtccttaaagactacctccctcccccaacttctcacacccagcttcccacaccagcagctcagacacacacctggaatccactgcacagtgagaaaggagaattgggttggccaggaacaacagccagggcaagcagggcaagtgccaggcagcagagggtagctgtccctggagagttctctgaggctccccaccccaccccagtccagaggtgaatgtagggtgtgcttgcgcatgctctgacctggactgaagtcaccctccatgcccacctccctggatctccgtgagggggggtttcctgagcccacagagagcccagcgcagcatctggcacatggctggtgcccaagaaaccgcaattgctgtgatggtcatggagactgcacagtgctgaggtgaagggcagggaccccagccagacagcctggggttcaaggccaggccagccactttccagctgggccgctctggatacgatcacatgtcaccctcctacacctcggtttccccacttagctgagatagggatattggaagggtggcactgtgagtgagtgaatttcaggcctggctgtcatcagggggacttaagggtggctcttcccatctgctatctcatgctgatgtgtgtcctgtcctgtgagctctccagatgccaggcccggcacccccggccctgtcagctgggtggggctcacttatgtacctgtcacctctgcagatgtgaggggacctcctgtgtgcctgtgtaaagccaggtctggagtcccaagagcttgccctgagcaggggagatggaggcaggagggaggctgttcccagagatggtgggagggtccccacagggctgtgctcagtgtcgcctggtcgtggccctcatgtgtccttctgtcctgtgtcacagtgcagggacttcacagcccacacgggctacgaggtgctgctgcagcggcttctggatggcaggaagatgtgcaaagacatggaggagctactgaggcagaggtgagctgctgggcaggccatggggagcgcaggcaggaagcaggtggcttccgctcggctcctgggacagtggacgaggcccccatcccagccaaactctgtcagaacacgccctgctttaaaaaactcttctgtgttccctcaaacctgggcctcccccagaggtggcaagtcactgatgatctttcaaatgcccttttttttgcagggcccaggcggaggagcggtacgggaaggagctggtgcagatcgcacggaaggcaggtggccagacggagatcaagtaagatctcccgggccctggggctcactcctctcctctgctggcagtttctgggcctttagatgaggtttaggtcttcctggcatgggggaggctgggcagaaccagggtaggtctggattgctccttggtgcctggttattgggcattcagggtgaggccaggttctgtgagggaggaagcccgagggtctgagttctggaaagggtctgggcaggggagacaggaggccatccatcctcagtcatttgcagcgcagtctgcaccagcctgggtggcctccactgaagtcctgaggggcaggtgacaggcgtctccactggtggctcaagtcccctgcagcactggctcagcatgggcttcaaggatggagatgtagccagagacaggggtccaggaggggacacacctgggttccggtgtcagctcctcaccccccagctgtctgaccatgggctggctgctgacacactctgtggctccgtttcctcatcagtgatgggaaagtaacgcagccctcctcaaaggaagaagtgggcccatgggcttagctgaggcctggttagagggcaggccgtcagggaagtggctctgatgaagcgggagtctccagccccacaggtctctgcacgcagactgctggggtgggaggccaggtgaggagatgaaggtgagttcaggacacagccaccctaacagtggagtggaggggctgctctgggaaggcccagactgtccccctgggtgaggacagagccaggccaaggggcagacagaccaccggcctccaacttcttgaaagggctctgcagagtcctcctgccgaggggccctgagcctgaccctgcagctgctgtggaaccccttcccttcctgccttctcccccgagagaggaactgaatgtgccatactctgaaggtcccccaaagacaccaggcaccctggcggctcctgcttccaaccaggagccagagatcacaggaaggcttagatgtggcatgagccgtgtgtgaggccagaaagttgcacacagccctgggaggacggagggctctgaggagcccttggagctctggtcccggctcggccaatctgagctgtgggactgtgggccagtcgcctagcctctccaagtttgtttctcacctcccactccagcgagctgccgtgcaaatcaacaagaacatggtctgagggcctcccaagggaagggctgagggccgggtgcaggctgggcacagaggagggctcaggacatggtgaggagtgaatggacgtatgcagggaggtgttttctgcaggaagcagtgcccagagctctcagccaggggaggagcagctgtgggggcctggcagcatgaccaggggagcccctcctggtctcctggcctcccagcctccaggccagctggaagagaactttcccagaaagagagggtacctcatggggagaactcagagactcaggagaggtggagagggtggccccagcagggcacaatgggagccaggctggagtgggtctgtgtgatgcaggctcaggggattgtgagtcacaggggatttacagcagggaaagagaagctacccacagaaaatacaatgggggtggggagcagggtgggcctcaggaagcgggaggtacgcaacatcttgctccatttgtagaactaggaaggggccaggtggaggctctgggcggccctgattgcgccatggttattcaaggccaggtggggcagggtctgccctgacttatcctttgtgtggccctggatggtcctccctgtctctgagtccagggtctgtacctatggaaggggatggtcacttggagaggtgttctgggcagtcacaaggacaagcagagagtgccaagccacaggggttcactgcacacagtggggctccatagtgttgctcttgacccatgtggcatgaagtactgttgatgaggccatgcagctgttcctttcggtgtaggccaagcatccatcctccatccatttagtcaccatttaattgaggacctactatgtgccatgccctggatgggtcaggaggattcactaatttaaaataaaataaagggctttgccattccttagccagagtccagcacagtgagggtgacttccttctccttcctagtcctttgcattagggcccatttatgcgccacctcctccaggaagccctcccagacaccttgccttgccttactgtcagagtcttggcttagacccaattacccctccccatgccaacctgaagggcttttggtggggaagtgtgagcagtggccgtggacctgtttcctcatcttagactcctgtggggggggggtgtgtgtgttggccctcaggaaaggtgacccggctcttcaacatcggggctggtggcccaccctccagggcccatccctgagtaggggaagcccctggcctccctgaggcccacagctgccccccaggtctatgggatgctcattccctgccccttgcagaacgggcaggggactgggggatgggaaggctaggaacagggtgcagaacgaggacaaaagccaggtggttaagtgaccctataaatagcctagtgagccctgagggcagaactgctgcctgaaggtactgcatttctgcagtcccctgacctcaaaccagccgggagccaccctcaggcctggaggctcgggccactgaaattaacaggaggttacatcttaagtgatttttgacatgtacctccttcacatgttaactcagcaaacatccgtggggcagtggcaatggaggatggacaagtaagacccagtccccaaactccagggatccccaccagcgctttcagtgcattttaaagacagcattagggccaggcgccgtgcctcacgcctataatcccatcactttgggaggctgacctgaggtcaggagttcgagaccagcctggccaacatggtgaaaccccgtctctatcaacaatataaaaattagttgggcatggtgacgcgagcctgcagtcccagctactcaggaggctgaagcaggagaatcacttgaacctgggagacggaggttgcagtgagcccagattgcaccactgcactccagcctgggctgcagagcgagactccatcttaaaaaaaaagatagtgttagtatttgcagggggcttaccaacattgctgacatcacatgtccagccctgcagagactttgcctgactctcctttccagcctctgggcctttgctcctgctgttgccctgttgctcccctgcccagtcccacccatccctcaaggcctgcctgaaatgtcacctccctcagaaagctgtcacctccactcccctattgctcatcctgcgtcaggtaaggtgctgggggtgctgcatgcccccagaagctgcacagggcaggggtttgggaaacaaaggaaaaccaaggcaaggccagcttcctgtagcccctctgtggttaccagtgggcaggtacagcccccaaggggtgcaagtttgaatcctcacgtccctgcctcacccccagttgtcacaaaccaaaaatgctgtggttttcctgtcagagagatttttaaaatttttttcatggtctctcttcctctgaactcagagagaatgacgacattgctgaggatattggcgggagagagccaggccctgttcctgtcagatgtcccctgacgctggctcatcgtgggcacagcctcagcacagggagccgagagggctactcctgtcagctggtgggcaggcagcagggacacagtggggtcagagcaggaaacacactggaaatctggactgtatttgagcacagaatttcagactgagcttcctgagagccgagtcaaaaagggcaatgggatgagttacacatgaaggcactggtgacagatggcagtaggcagaggcctgtgcaggaccctgtcttcaacatgcgatggagacacagtagaggtgctcagggagatcttgacagtttccctgcacagacggtgggaggaagcaggaatttcatggggcagagaatgactttatgtggcccccagatcctccccaagatcagagctcaaggctgttcactttgggggttctggggcaaagctgggctcctcctctcatccacagagctgaggctgcctccttgaaatttcatctggggccaagaaagggaggagtgttctgggccttgttgtgtgagctgaactagggtggcctgatggttccagcaacggggacaggggacctggggcaggaaggcctgcagcccaggggacaggaagaggggcctggaggggccaaagcctgcctgcccaggtaccccagacagaggtagcaccagtatctatgcagtacccaaggcctagccaggtcatggggacaaatgggagttcaaggtgagcacagaccatcactgtcaagactgtcccaggggtgggacagaggctgaatgtccacctggcagtgctgtacgttcaggcaggctcccagctttcaggtgggggctgggaaaagggccagcagctcccagaacctgcgattccttacagcacccctcagcctgagaccatgaaccggggtggcccacaggtgggtttggggttgagaaaatttagattatgagcctggggacaatgaggaggagagccaggcattgcccctgtcctcaagggctcatggttcagctgcgtgacagacatccgctgggccagcccaaagtgacatcagtgctcagaaaggacaaaagaggatgccaggcaaagatgcagcaatggagatgggcacgtgcaaaggccctgaggcaagatggagcctggcacctggaagcaacgggcggaggggcagagagcagggctgacaggtgggaggtggaggtggtgcggcaggggctgcagcggtggtggcagctagcgtaggacagtcacgagatttaggagataaaatagaaggtggcggcaaggaagggagaggacagagcctggtgtgactcctgggtttctggtgtgtatagctggtggacagtggtgtctttgccaagaggggagccctggaagaggagaggtttgcagggcaggtgctgagtccggttttggacacgctgaatttgaggtatctgtcagatatgagacccaaaaggtgagggcggggaagtggatgtgcaggccctgagctctgggaggggtctgggtatgctgtggtcatgaaggaggcggggctggagggtggtgtgcatgagggctgggttgggggtgcggggaccacgctgtgcctggaggcctctaactgaatgagtgggactgagctgaggggtgaactgacaggaagcagagggattggaggtgccactgctggtgaggagtcagagaagagtcctgagccccacaagggaaggtggggtcaccacacagccacccctctccttcttcctctccctggttccgcctcttaccgcagggtggccacgggcgcagctccttcactcctctgacccttggcttctcatctgtgaaatgggataataaaggcacctgtgctggcagagttgtgagcagttctgacgtctggatgggcatcagcagcgcttggggccgggccccaccccgaagcctcagcctcaggaggtcggggaggagcctgagaatctgtatttctaacaggctccgcggatgctgatgccgctggtctgtggacctcactttgggatccacgagtttagggcgaggggcctggcccccaccgatctcccccaggcctggatccccaggctcctgccaggctactgctcctccttggcctctgcttccccaggtgtctactgagaggagaagccccctgagaagcctgcctggtgcgctgccccctccacccagggctgtccggtgggcgtcatgaggccatatggccgccagggggcagccgagctgctccacagagaggctgcagggagagccagataaaatactggatgcccaggtgaacgtgaatttcagataaacaacaaatactttaaaaataaaagtccgttttaaatactacaaggggcatactatactcaaaaagtgctcgttcatctgagattcacattgcactgggtgtcctgtttttatgtgttcattctggcagcccccgcccatcattccctgcctcctatgcgcagtgctgggcccttccctccctccctccctccctccctggcagacagtgcccacctctcaactcctgcgccctgccctgctagcctctcccacggccatccaacctcctccaaacatcccccgggccacctgctgagagcccatctgaacactgtcccctcccctgtagcctcaccctggggccatttggtacctgccgaggagagagggctgtgaatgtgggagaggagttcaggggagggagggagggtcctgaagacaatcccctcttctctaagaatgcagctaggagcacagatggtgggggccttcggtacctcctccttctgccacattgcagagggttgattgctttaatttgcagagagctttgtcttccagaaatcagtctggggccccagtggatggtcaccatctggctaaagggtcccttggttctagagtgacccagggtcttcccaccaaaataaaagtcctccccactgcccaccccgccgggaggcagcctggactgtaggttcccgctgtgctctcctcctcctgacctggacccatctgttttgcagctccctgagggcctcctttgactccttgaagcagcgtaagtcccctaccctggggcaatgggatcttttgggactgcgaggctggtggagggtttggggggacagaagatgaggtgttggggctggggctgggctggcccacacgggtgagttgtgggtggctgaggcccatcagatctgacactggggaccagtatccatgctctgcccccagaaatggagaatgtgggcagctcacacatccagctggccctgaccctgcgtgaggagctgcggagtctcgaggagtttcgtgagaggcagaaggagcagaggaagaaggtgaggcaggtgcagggggcgggggagctgctcccccattgccagcctctcagttgctgtgggggtagggggctgaccttcctggtagagccagtggagggcggcaggggtggtggtgggacagcactccaggctttggggcttgagggtgatctgaagtgggtagggagggcagaggcctggccgctggcactaaggccaactcttagtcccagagccccatggaaggtccttcctgtcgagctgcctcacgcctaggaggatcctactacagcagactctagagggtctgtggcaacttggcagtgtccagaggaggcagtctgagttgtgggggtcactggaaactggtcttgagtccaaggatcagggctgattgtcctggaaaaaggcagacttgcagccagtcaccccacaggactgcccaaggctgaggggtcagacacagactggggtgggagagttgtatggcattgcttagcatccaaaggtacttctcacccatatgtagggcatggctgtcccgagacagagtgactgcatggaagtgaagtccccatcatgggaggtgtgtaagcagaggctggcagatgcttgtcagggaggctgcagggctgaagttggatataggttccctggagggcaggcaggacgcagactggcctggaggctgggcttgggcctgtgaggatgggggctgagcctctcagggccttagtgatgagggtggtgccctgcacagggtggcagggcagcacacagatccgcttcttgcctggggaggaaggatcgttgtgaagtggccaaagaattgaaaatgaaaagtcacaactgagccttgaaggggaagaagctgtacctgaggctggggccaggctaggcctgggtgtcctggccataccacttcccatctctgtgcctcagtttccctctcacaggatgggacacatatgtctacctcccaagtgctgggagctcagcccaagccatgcgcccctcagtctccacagacagggctccagctctggttagcagctctgctggcagaaatgtagcgtggctgcccgtgccacctgcccatctgccagctgggctttcaggattctaaatgtggggttctgagcagacagggggtccccagaagccagcccaggcttgaggtgccggagcaggcaccctctctgagctgggacgtgcccgcagagcctgcagagaacctgccaggaaggagggaccccggccctgctattttgggccctcctgtggccagaggagctgcactggctgcaaaggctgttttggacagagcattctttctccaagtggccagggccccgcaggcagagcgctgtgttgtagtgtgtgccatgtgtgtctgagcctgtgtgtgtatgtgcgtgtgccacagagcaaggacatgtgcttacaggatggtgcacacgtgcctacgctcccctgcatatgcctgtgagcatgtgtccttgtccagccctgtgcacttgggtgttttgtgctgtgtgtgtgtgagtgcctgtgcctcgctggtctcccagctggcacagaacccctcccctgagaccccaggcacaaactggctcagttctcctcctacctcataacccagtcgctgtcctggctgttttgccttctctatcagaacaggaagcctgggaggtgaggggaggctttggccccagacctcggcacaggggcccagtggccactgtgcctgcatgtggcctgtggttgtgtgtgggtgactgtgggagtgtgtacttgtgagtggcatctgtgggtgtgcacaggaatgcctgtgatcatgcgtgtgggcagctagggatggggcctgtgtgcctccgagttaatgtggaactctgcatgtatgtgtgtgccagagtgtacacacacgtgtgagcgactgtgatgcctgcagaggctcagggatgcaggatgaacgactgtgtgcgcacgtgtgttggggtgggaactccccagctggagacgaagctctggccaaggtctgcagcaaggacctcacggcacacccatgccctgtgattctctgtggccttccattgtgagggtcactgtgaagcagcaggctctgggggagggagggcagcctgtcaccctctctccagagccaggagaggtgctgcgcctcatcccagggacactccgtcctcttggcctaggggagcctcccgaggccgcggccctcggctcagaacctcgtgtcccctgcagtatgaggccgtcatggaccgggtccagaagagcaagctgtcgctctacaagaaggccatggaggtgagcgccagggcctggggccgcggccttccctcgaggagcagcgcaggtctcagggtgcgatcctgggctgtggccccgggcagggcatttggaacaggctgacctcagccttggtcctcggacctcggccttgggcgcaccagcctgcggggcgcttgggcccgtgctgggcgctatggccccgtggggatggtcccgggcccttcccttgtggggctcgtgaatgaagggcagatgaagtcagctggggactccaggggtggagggaggagggacccctgagcttgatcctgcgagacgctggacaggaagggagaggggctcctaagagggcgcggcgtggcgaggggcgtggcgaggggcgtggcgaggggcgtggcgaggggcgtggcgaggggcgtggcgaggggcgtggcgaggggcgtggcgaggggcgtggcgaggggcgtggcgaggggcgtggcgaggggcgtggcgaggggcgtggcgaggggcgggccctcgctgaagagcacagcccaggaggcggggcccggggcagccgcgctgtcctcagtggggagggcctgagagcaggactaccagcagcccccacgccttctctatctccttccggacccccagatccctgtccctggtgaggatgcccccactccacccgcaaccctcgccagggaaaaagggaggctgggctaagggagcctcactcccggggaccacagaacagggctgtgcagcccccaagtcacgcccctccacacccccagtccaagaagacatacgagcagaagtgccgggacgcggacgacgcggagcaggccttcgagcgcattagcgccaacggccaccagaagcaggtggagaaggtgcgctgggctgctgggccgtgtgggtcgcccagggctgggggcagtgggggaggcaaggaaggggtgccgtagacacccccaggcaagatctgcatctggggatgctgcttagccctctctgacccccaatctccccatctgtgaaatgggtttcctggagagaacctcaggccatggacaggcaggtcagctggatcccctttgccaccgtcaggcggcactcagggacccattcctcggtgcaggcccactgaggcccacagggtgatgagagcagacgccaaccctcacacaaccttggagaagggctcagtaggcccatgtcacagagaggaaactgaggctcacagtaagtgacttgtctaaggtctcagagccaggaagcagcagaaaagggacccccaactcaggtggtctagagcccatgctcctgatgctgtggcccctaggccagagtgggggtatcagagctcccagagcccaggaaacacatcactcattgcacagacaggaaggctgaggcccagagagggaagtggcctgagggtgagctgggggcagtcagtcaggggccagagcccaagtcccagccagggggctcagcagtagttgcacctctcctgtgggttgtggtctcactcttcacaggcatcctcctgggctcggttcctgtcttcgttctctttccatggagctagcctgtggtcctctgtgggcggaggttgcttgtggatgatggcatctgcccatagttggctcctgaatgttccccccagggtggccggggaagcttgacagtcacttcaggtctgctggggtgggccctggctcctggggcaggggcttagcgctgcttcccctctgtttcctcagagtcagaacaaagccaggcagtgcaaggactcggccaccgaggcaggtatgtgggcctggctgccccgtccgaccagggcggaggcctgggcggtactccccacacacacctcctcaccctggggacacacacactccccctggctgcacaatcatgggcgcggcgctctcattccagatatgtgccgtcaaagtaaacgctgtgttcccccattcgccagcccttcttggcgcttcatgtgttcagtcctcacagctgccctccgaggtggctgctgttactgttccctttcttaacagatgaggaaacagaggcactaaaaggtccagtacttgccccaggttacagctgcatttgaacccaggccatcgggcttcagagcccaggacttgtgcacatagccttctctgggcctctgtccttcacttgatgcccgaatcctaccaacactcttgtccctgctggtgccccacccaccagacacagcacccaccctcctcccttcccctgggaaggcctctcccttctgctctgcctttactgggactcagctactccctcggctgggggacaggtgacctccagagatctgggcacagaagttgtgacccaagcctgtgggactccacccctcctccagcgccctctcagctgccttctctgaacctcagtttcccctctggaaagtgaggtggggcgcccagagatgcccagaggccaatactctggacttgcatatatgaggctccactccagccctcaggcagctcagagcacagttggggagcagcagcagcaccagcgtgggtggccctgacgggcattcagatgaggccccgccatctgctagggcaggtcccatgggggaggcggggctcccagtgggaggaggcatccaggatgggacctgctggagtacaggggtggaggagctcgtgtcagggccctccctgaggctgcctgcgctttcagagcgggtatacaggcagagcattgcgcagctggagaaggtccgggctgagtgggagcaggagcaccggaccacctgtgaggtgagtggcccacgtggagcctcgttttccccagctgggaagtgtgagacgcccatccctactccagctgcttaaaggggcccaagcgaggcagttggggaaggtacctgttactcactcgtttattcagcctcctgctcacaggcctgtgctgggccctggccctgttgcttgtcgcctggccttgagtcctgggccccttcgttgcaggcaggcattcttccaccctctttgttgaagccaaaactgggacttggactaaacccacagcctctctgggtgctgccgatggacagggcctggggaacagggctcaggactcccgtccgaggtccctctcactacccttctgcctcggtgtggtgcagcctgaagggaggctggggcagggaccccctgggcatctccacctccctccctgcagcctcagggctggcccggagtcgggatggggaccccagggcactctctcctttggactgggcttccagcagagagggctggcctggtcagctccggctgagctgtgaatggggcccagcctggccgggccctgcagccgcctcctcactgctcacctccctcccactgcccccaggcctttcagctgcaagagtttgaccggctgaccattctccgcaacgccctgtgggtgcacagcaaccagctctccatgcagtgtgtcaaggatgatgaggtgggggctgagggccttggtgtggggtaaggtagggcagcctctaggcagcaaagcacccaggtccatctgagccggtcaacaagcacctggtcctctgtgatccaagcctggccccaggggtctcaggcctcagcagctcagcctttgcccccagaaccccaagacaggagctcagtaccacacagggccatggcttctctgcctggaagatgatgactctgtggttcccctgacttcctccttatgcctcagagccacagagcacctgccccctctgccggggatgggaggggaggtggacacagctgtcagaggttggcagaagctggaggaccgtggctgctctgctctaggcctggtgcttgcaggagccgaggcgcagtccttcctctgctccccacatctccagggtgtcctggttccccttactgagcccaacctgctgggtgggtcctccccagcagagagggcccccagccagggtccctgagctctgtggatggatgcagcccagcacacggctctcccgggcagccctggcccccttgcctgctgtgtttcctgcctgacgctcctgtccggggctgtgggggttgattttcttgttgtttttgcccaagtgactcgagccccctgctgcctcctcgcctccttgaggtagaagggcgagctctggacccactctcctagccccaaggcctggctgtgctgcattctcgctgtgaccttgggcaagtcactctcctctgagtttcctcatctatccaatgggaaaagtggggtctaccttagaggacaggtgtgagttaagtcccttgcacagggccttgcacacagaaggtgttcaggaaacaggaagctgtcagccagggccgtgacccctcaggatcaaagaccccgagccgcgcacaatggcctgtgaggaggccggtgggtgggggccgctggtcagagttcaggcccacagaggggcagagtgggcatcgggctgcggcctctgctctttcctgccccagctctacgaggaagtgcggctgacgctggaaggctgcagcatagacgccgacatcgacagtttcatccaggccaagagcacgggcacagagccccccggtgaggtccggcttgcggacagcgcagcctctaggtgcattgagcccctgggaaggcccggccctgagcctcaagtgccaggaccgggctggggtagctcacagctcccttcagggcagagaagccctagcaggggttgtggggagttgggtcccaggcctgctgcctcctctcaggcaaagctaagggcatgatggcactcagaggaagaggtggggatggggattgaggtgaggagctcccacggcccccactccccgcctgtttggttccactggatcacgggtccagaatattaggtcttgatggtacctacggtggggtctctcatgggagcaagacaggcacctcctcaggcaccaggatgggccagggccagattgggaatgtagggccccagctgagtctggcagggccagaatggggtgttgggggccgccctggggctcacggcttgctgtctgcagctccggtgccctaccagaactattacgatcgggaggtcaccccgctgaccagcagccctggcatacagccgtcctgcggcatgataaagaggtgaggccccgacagacggagggagggcctaaggctgggccaggaagtgggtcgagcccctcctctgcacctggcccttcctcgttcactgagcacctactatgtgtctgtatctggtgcccagtttaggtgctgggcactctgtggagacaagataggctcagttcagcctatggaaccctcagcccaagggacccagacactagaataatcacaccccaattattcactaggggaggtgctccgagctctggggaggcccctatgctggcttccttgtccctggggcctcatgtgagcctggtgccctgtcaggctgcagtggcaacgctgtctggctggagcaggactggggcatctggagaattctccaggcttttccagggctccttccccggcctggctgcagtcaagtgccaaggtcctagtgctgggcctcaatgtgtgacctgggcaagtcattcacactctctaaggccagggccctgagtgttggggtcagattcagaatctaaggactctcctggttcaggccttgagtgacgaaggtgacagcccattgggagcactatagccagcttagggagccctcgtagccaggcctttgagggaggccatgtgccctgtgagcatccacaagggtctgtgggtttcacatggtgcctgtgcccccaccgccatgccaccactcttcagccacccttcaaccaagaaggccctgcctctgggaggtagtggactgtggggagaggctgatgcagttcccggcccttcccaaggaccagctcattccagggcctcaggagcccctggaacttcctactcctgggaggcagaggctcgtgggaaccacccgtgcttagagaggagcacacacacaccctctttgagaatcttgtgcaagcagtgaccccaggaggcagcacacccgcagcctcacatgctacaaaagcttgtgagacaggcttccctgtgcctggtgaggacctggatcccagcaaaggtggtcatttaagcaactggacaaaagagctcacctgaagcagtatcaggaaggggcagaaaggagtggccccagagaggattagagagagagagagagatgtcctgcagggccgagggaggcctggctgctggagggggctggtcaggcctctggatggggcatctagaagccaggcaggactgggaagaggcgggggtcagtgactgggagtcagaagtgtagacagtctggggaaaagaggtgtggggcacgcagcacaatggctcagcaagccctgcacccctttccccctgccctggccgcttcctcctcctgtccccagcccctgctggcttgcaccctgtcctttgctgcctggggagctggcacgtgtgtctgcccgcctgtgttggtgtcaggccctcccatgtgctgggtccacgcatgtccaccctgcgcatgtgtgtgcactcctggggccttggccctcggcgcctcatgtgggaaaggccccccacatgccaccttgaattgcagggctgccccccacaggcccctgagtcatggctcagcccctcacctgcattcaagatccctcagggtctggtccagtctctatttcagtcctgtcccccacacacccaaattggtccactccactccacaaaccccacctgtgccatgcctcctcccctgcacctgagccctccctctcctggtcacctgcagtgcctcgctcccccttctctcctagtaaagcttcactcatctttgaagactcagccccaccccactaagaagccctcttgccttggaggcagtgtcagcctctacttgttgagccctcactactgcccacttcagggggtgcccccagcatctgccgcatctgcctcttctgttttattttcctttattcagtaaaccttcatgaccccagctcagtccaggcctaagcctggtgcaggggcaggggtaaagtagcccagcgctgtcccggaactcctgtgaacagggtggctgagctggcctgatcaccgtgggcccacagggaggagggctggctcggcccaggcagtggaggcctcagcagggcacgtgagccaggctttgtgtggcagtgcaccccccacccctacccacgggggaagctgctagggcaagctagagcaggggcctggagggtgaggactgggcatcttcccacgaggcctcagtgcggaggtcctagaacccccaaagggccatgggagtcttccaatgaagctacagcttcgggggttctaggatccccccaagggccctgcagggagcaggtgctgagatggcctgcagagggcgccagtggagggcgtagctggggaaggaggagccaccaggactactttctggggagccctcctgcctgaggggcacctcataaatgacatccatgcctggaggctaggggcagtcccagccctggcagagcgcgtgcagctctgagacctctccctgtctaaaccctccctcctggtgggtccctgagtgtggggcggggacactcaccctctttcctccctgttcccaggttctctggactgctgcacggaagtcccaagaccacttcgttggcagcttctgctggtaaagggggtcaggaggggacccccaaacacactgatcctgggggggaggagaggtctcccacatggcacagatggggccactgaggccctcaagaggaagtgtgtgtcccccaacagcaagtgtggacagcagaaggaagaggcagggcccagcatggagaaaccccattctagtaggacttccaggggccagtgtccccagaaaggggaggggtctatgtctcaccctgctcttagcgtccacagagaccctgacccccacccccgagcggaatgagggtgtctacacagccatcgcagtgcaggagatacagggaaacccggcctcaccagcccaggagtaccgggcgctctacgattatacagcgcaggtgaggcctctataccccaaacccacctgtgccacctcccctgcacctgagagctccctctcccatccagtgccttgcgtcctcatctctcctcatggtttcactcatcttcgagcatcctctcctcctcaggagggcacgtgtgcccgagtgtgtccacactagcaagggtacctgggagtgtgcttggatgtgagctctgagaacagcacccagggcttgcggggcctcagtgtgcatgtactgactggaagctggtgtgcagcaggcctgtgtctgcccgggcctgtacacagcacacacgtggagcacatgtacctatgccgtccacacaggctgggcgctgagtggtgcacacgtgcggggagctggcagagcctggagctgcctgcaggtcatagcttgagggccaggctctgtgcctttgggtcagggccctgtccttcgtggccatgggtgtggaaaactgtggccagaatgagtcttgctatcgtgccaggattgattttctgatgtccatagggtgaggatgaaccaaggcagccacagggcagctatgagagtcctttctgctccctgcttgaggggaagaatgcatagccagacctcacatccacctggactgaggccaagcacccccacatagccaggcaggctgggtgtggactccactgatgaggccagggctcggggaggcagggaagccaggccaggagagtgatggggtacttggatggcagtggctagctggggctggggaccgcaaaggggaggcttgtggtaagcttaggcatgagtgtgccctgggcttggggtatgatgagcacccgtgacccctgacatgctccagtcactgcgtctccagaatgggagaggggaggtgaggctgggaagaaacccaggttgggggagaactatgatgacaaactgagggggatgggaggcccggtccgttgggttacccccatcctgtgtccccaaggggctgcccctgcccaccctgggagacatgccgcatttactgctgggtgggggaacgccaggcccctccctgcaggcccttccctgcaggcccttccaacgtcatgcgctttcaatctcttggccagaacccagatgagctggacctgtccgcgggagacatcctggaggtgatcctggaaggggaggatggctggtggactgtggagaggaacgggcagcgtggcttcgtccctggttcctacctggagaagctttgaggaagggccaggagccccttcggacctgccctgccagtggagccagcagtgcccccagcactgtccccaccttgctagggcccagaaccaagcgtcccccagccccgagagggagcctgtcgtctcccagggaataaaggagtgcgttctgttctccttggtgtgctggggtcccgttctctttttctcctgctccagtgtccgagtgctcagttcagaggaggcaaaggaacaagggaaggagcctggatgtggagctccccaactcagccgaggcttcagctatagttggagaagaggcctggccccagttgctaggagctcccagactgccaaggagacacattcacacctggacagaggacacaggggtgcaggaggatgtggcaggggcaagaaggggctcagcagggctgcaatggggagagcaggcttcttgggggcggagggttgagcaggtccatggctgggcagcagtggccaggccagggcaagtgcgtgggcaaaggtgaggttgggggtacacccaggaatattcggaggactcagtttggaaacaggaagctggtgatggatctgttggagaggccatggtgggagcccaggaagacaggcttgtggcttgtgggtgcaagtggggcctggggaagccactgctgcccatgacactcccctcaacatggcaaccccggccgagcaggggtccacagcccaggcacgttggccccgggcacagagggagctgttcttgaaggccttcagccccttctctttttagtcccaggaacataactttcactgctggccaagccctgctccaaccatgataggcttcatccatgccaaaggcattgggagtgggtgtggaggagagggcccctggccattgaccactcctcagtcctgggagtggccaagccggcccacctcacaccctcctgggatccccacccggcttcggagccaggcaggcccaggactgtaaggggcgggatgggggacacagtggtcctcctctgctgggaccacactgatgagctgctgcagggcactgctgttccccatggggannnnnnnnnnnnnnnnnnnnnnnnnnnnnnnnnnnnnnnnnnnnnnnnnnnnnnnnnnnnnnnnnnnnnnnnnnnnnnnnnnnnnnnnnnnnnnnnnnnnnnnnnnnnnnnnnnnnnnnnnnnnnnnnnnnnnnnnnnnnnnnnnnnnnnnnnnnnnnnnnnnnnnnnnnnnnnnnnnnnnnnnnnnnnnnnnnnnnnnnnnnnnnnnnnnnnnnnnnnnnnnnnnnnnnnnnnnnnnnnnnnnnnnnnnnnnnnnnnnnnnnnnnnnnnnnnnnnnnnnnnnnnnnnnnnnnnnnnnnnnnnnnnnnnnnnnnnnnnnnnnnnnnnnnnnnnnnnnnnnnnnnnnnnnnnnnnnnnnnnnnnnnnnnnnnnnnnnnnnnnnnnnnnnnnnnnnnnnnnnnnnnnnnnnnnnnnnnnnnnnnnnnnnnnnnnnnnnnnnnnnnnnnnnnnnnnnnnnnnnnnnnnnnnnnnnnnnnnnnnnnnnnnnnnnnnnnnnnnnnnnnnnnnnnnnnnnnnnnnnnnnnnnnnnnnnnnnnnnnnnnnnnnnnnnnnnnnnnnnnnnnnnnnnnnnnnnnnnnnnnnnnnnnnnnnnnnnnnnnnnnnnnnnnnnnnnnnnnnnnnnnnnnnnnnnnnnnnnnnnnnnnnnnnnnnnnnnnnnnnnnnnnnnnnnnnnnnnnnnnnnnnnnnnnnnnnnnnnnnnnnnnnnnnnnnnnnnnnnnnnnnnnnnnnnnnnnnnnnnnnnnnnnnnnnnnnnnnnnnnnnnnnnnnnnnnnnnnnnnnnnnnnnnnnnnnnnnnnnnnnnnnnnnnnnnnnnnnnnnnnnnnnnnnnnnnnnnnnnnnnnnnnnnnnnnnnnnnnnnnnnnnnnnnnnnnnnnnnnnnnnnnnnnnnnnnnnnnnnnnnnnnnnnnnnnnnnnnnnnnnnnnnnnnnnnnnnnnnnnnnnnnnnnnnnnnnnnnnnnnnnnnnnnnnnnnnnnnnnnnnnnnnnnnnnnnnnnnnnnnnnnnnnnnnnnnnnnnnnnnnnnnnnnnnnnnnnnnnnnnnnnnnnnnnnnnnnnnnnnnnnnnnnnnnnnnnnnnnnnnnnnnnnnnnnnnnnnnnnnnnnnnnnnnnnnnnnnnnnnnnnnnnnnnnnnnnnnnnnnnnnnnnnnnnnnnnnnnnnnnnnnnnnnnnnnnnnnnnnnnnnnnnnnnnnnnnnnnnnnnnnnnnnnnnnnnnnnnnnnnnnnnnnnnnnnnnnnnnnnnnnnnnnnnnnnnnnnnnnnnnnnnnnnnnnnnnnnnnnnnnnnnnnnnnnnnnnnnnnnnnnnnnnnnnnnnnnnnnnnnnnnnnnnnnnnnnnnnnnnnnnnnnnnnnnnnnnnnnnnnnnnnnnnnnnnnnnnnnnnnnnnnnnnnnnnnnnnnnnnnnnnnnnnnnnnnnnnnnnnnnnnnnnnnnnnnnnnnnnnnnnnnnnnnnnnnnnnnnnnnnnnnnnnnnnnnnnnnnnnnnnnnnnnnnnnnnnnnnnnnnnnnnnnnnnnnnnnnnnnnnnnnnnnnnnnnnnnnnnnnnnnnnnnnnnnnnnnnnnnnnnnnnnnnnnnnnnnnnnnnnnnnnnnnnnnnnnnnnnnnnnnnnnnnnnnnnnnnnnnnnnnnnnnnnnnnnnnnnnnnnnnnnnnnnnnnnnnnnnnnnnnnnnnnnnnnnnnnnnnnnnnnnnnnnnnnnnnnnnnnnnnnnnnnnnnnnnnnnnnnnnnnnnnnnnnnnnnnnnnnnnnnnnnnnnnnnnnnnnnnnnnnnnnnnnnnnnnnnnnnnnnnnnnnnnnnnnnnnnnnnnnnnnnnnnnnnnnnnnnnnnnnnnnnnnnnnnnnnnnnnnnnnnnnnnnnnnnnnnnnnnnnnnnnnnnnnnnnnnnnnnnnnnnnnnnnnnnnnnnnnnnnnnnnnnnnnnnnnnnnnnnnnnnnnnnnnnnnnnnnnnnnnnnnnnnnnnnnnnnnnnnnnnnnnnnnnnnnnnnnnnnnnnnnnnnnnnnnnnnnnnnnnnnnnnnnnnnnnnnnnnnnnnnnnnnnnnnnnnnnnnnnnnnnnnnnnnnnnnnnnnnnnnnnnnnnnnnnnnnnnnnnnnnnnnnnnnnnnnnnnnnnnnnnnnnnnnnnnnnnnnnnnnnnnnnnnnnnnnnnnnnnnnnnnnnnnnnnnnnnnnnnnnnnnnnnnnnnnnnnnnnnnnnnnnnnnnnnnnnnnnnnnnnnnnnnnnnnnnnnnnnnnnnnnnnnnnnnnnnnnnnnnnnnnnnnnnnnnnnnnnnnnnnnnnnnnnnnnnnnnnnnnnnnnnnnnnnnnnnnnnnnnnnnnnnnnnnnnnnnnnnnnnnnnnnnnnnnnnnnnnnnnnnnnnnnnnnnnnnnnnnnnnnnnnnnnnnnnnnnnnnnnnnnnnnnnnnnnnnnnnnnnnnnnnnnnnnnnnnnnnnnnnnnnnnnnnnnnnnnnnnnnnnnnnnnnnnnnnnnnnnnnnnnnnnnnnnnnnnnnnnnnnnnnnnnnnnnnnnnnnnnnnnnnnnnnnnnnnnnnnnnnnnnnnnnnnnnnnnnnnnnnnnnnnnnnnnnnnnnnnnnnnnnnnnnnnnnnnnnnnnnnnnnnnnnnnnnnnnnnnnnnnnnnnnnnnnnnnnnnnnnnnnnnnnnnnnnnnnnnnnnnnnnnnnnnnnnnnnnnnnnnnnnnnnnnnnnnnnnnnnnnnnnnnnnnnnnnnnnnnnnnnnnnnnnnnnnnnnnnnnnnnnnnnnnnnnnnnnnnnnnnnnnnnnnnnnnnnnnnnnnnnnnnnnnnnnnnnnnnnnnnnnnnnnnnnnnnnnnnnnnnnnnnnnnnnnnnnnnnnnnnnnnnnnnnnnnnnnnnnnnnnnnnnnnnnnnnnnnnnnnnnnnnnnnnnnnnnnnnnnnnnnnnnnnnnnnnnnnnnnnnnnnnnnnnnnnnnnnnnnnnnnnnnnnnnnnnnnnnnnnnnnnnnnnnnnnnnnnnnnnnnnnnnnnnnnnnnnnnnnnnnnnnnnnnnnnnnnnnnnnnnnnnnnnnnnnnnnnnnnnnnnnnnnnnnnnnnnnnnnnnnnnnnnnnnnnnnnnnnnnnnnnnnnnnnnnnnnnnnnnnnnnnnnnnnnnnnnnnnnnnnnnnnnnnnnnnnnnnnnnnnnnnnnnnnnnnnnnnnnnnnnnnnnnnnnnnnnnnnnnnnnnnnnnnnnnnnnnnnnnnnnnnnnnnnnnnnnnnnnnnnnnnnnnnnnnnnnnnnnnnnnnnnnnnnnnnnnnnnnnnnnnnnnnnnnnnnnnnnnnnnnnnnnnnnnnnnnnnnnnnnnnnnnnnnnnnnnnnnnnnnnnnnnnnnnnnnnnnnnnnnnnnnnnnnnnnnnnnnnnnnnnnnnnnnnnnnnnnnnnnnnnnnnnnnnnnnnnnnnnnnnnnnnnnnnnnnnnnnnnnnnnnnnnnnnnnnnnnnnnnnnnnnnnnnnnnnnnnnnnnnnnnnnnnnnnnnnnnnnnnnnnnnnnnnnnnnnnnnnnnnnnnnnnnnnnnnnnnnnnnnnnnnnnnnnnnnnnnnnnnnnnnnnnnnnnnnnnnnnnnnnnnnnnnnnnnnnnnnnnnnnnnnnnnnnnnnnnnnnnnnnnnnnnnnnnnnnnnnnnnnnnnnnnnnnnnnnnnnnnnnnnnnnnnnnnnnnnnnnnnnnnnnnnnnnnnnnnnnnnnnnnnnnnnnnnnnnnnnnnnnnnnnnnnnnnnnnnnnnnnnnnnnnnnnnnnnnnnnnnnnnnnnnnnnnnnnnnnnnnnnnnnnnnnnnnnnnnnnnnnnnnnnnnnnnnnnnnnnnnnnnnnnnnnnnnnnnnnnnnnnnnnnnnnnnnnnnnnnnnnnnnnnnnnnnnnnnnnnnnnnnnnnnnnnnnnnnnnnnnnnnnnnnnnnnnnnnnnnnnnnnnnnnnnnnnnnnnnnnnnnnnnnnnnnnnnnnnnnnnnnnnnnnnnnnnnnnnnnnnnnnnnnnnnnnnnnnnnnnnnnnnnnnnnnnnnnnnnnnnnnnnnnnnnnnnnnnnnnnnnnnnnnnnnnnnnnnnnnnnnnnnnnnnnnnnnnnnnnnnnnnnnnnnnnnnnnnnnnnnnnnnnnnnnnnnnnnnnnnnnnnnnnnnnnnnnnnnnnnnnnnnnnnnnnnnnnnnnnnnnnnnnnnnnnnnnnnnnnnnnnnnnnnnnnnnnnnnnnnnnnnnnnnnnnnnnnnnnnnnnnnnnnnnnnnnnnnnnnnnnnnnnnnnnnnnnnnnnnnnnnnnnnnnnnnnnnnnnnnnnnnnnnnnnnnnnnnnnnnnnnnnnnnnnnnnnnnnnnnnnnnnnnnnnnnnnnnnnnnnnnnnnnnnnnnnnnnnnnnnnnnnnnnnnnnnnnnnnnnnnnnnnnnnnnnnnnnnnnnnnnnnnnnnnnnnnnnnnnnnnnnnnnnnnnnnnnnnnnnnnnnnnnnnnnnnnnnnnnnnnnnnnnnnnnnnnnnnnnnnnnnnnnnnnnnnnnnnnnnnnnnnnnnnnnnnnnnnnnnnnnnnnnnnnnnnnnnnnnnnnnnnnnnnnnnnnnnnnnnnnnnnnnnnnnnnnnnnnnnnnnnnnnnnnnnnnnnnnnnnnnnnnnnnnnnnnnnnnnnnnnnnnnnnnnnnnnnnnnnnnnnnnnnnnnnnnnnnnnnnnnnnnnnnnnnnnnnnnnnnnnnnnnnnnnnnnnnnnnnnnnnnnnnnnnnnnnnnnnnnnnnnnnnnnnnnnnnnnnnnnnnnnnnnnnnnnnnnnnnnnnnnnnnnnnnnnnnnnnnnnnnnnnnnnnnnnnnnnnnnnnnnnnnnnnnnnnnnnnnnnnnnnnnnnnnnnnnnnnnnnnnnnnnnnnnnnnnnnnnnnnnnnnnnnnnnnnnnnnnnnnnnnnnnnnnnnnnnnnnnnnnnnnnnnnnnnnnnnnnnnnnnnnnnnnnnnnnnnnnnnnnnnnnnnnnnnnnnnnnnnnnnnnnnnnnnnnnnnnnnnnnnnnnnnnnnnnnnnnnnnnnnnnnnnnnnnnnnnnnnnnnnnnnnnnnnnnnnnnnnnnnnnnnnnnnnnnnnnnnnnnnnnnnnnnnnnnnnnnnnnnnnnnnnnnnnnnnnnnnnnnnnnnnnnnnnnnnnnnnnnnnnnnnnnnnnnnnnnnnnnnnnnnnnnnnnnnnnnnnnnnnnnnnnnnnnnnnnnnnnnnnnnnnnnnnnnnnnnnnnnnnnnnnnnnnnnnnnnnnnnnnnnnnnnnnnnnnnnnnnnnnnnnnnnnnnnnnnnnnnnnnnnnnnnnnnnnnnnnnnnnnnnnnnnnnnnnnnnnnnnnnnnnnnnnnnnnnnnnnnnnnnnnnnnnnnnnnnnnnnnnnnnnnnnnnnnnnnnnnnnnnnnnnnnnnnnnnnnnnnnnnnnnnnnnnnnnnnnnnnnnnnnnnnnnnnnnnnnnnnnnnnnnnnnnnnnnnnnnnnnnnnnnnnnnnnnnnnnnnnnnnnnnnnnnnnnnnnnnnnnnnnnnnnnnnnnnnnnnnnnnnnnnnnnnnnnnnnnnnnnnnnnnnnnnnnnnnnnnnnnnnnnnnnnnnnnnnnnnnnnnnnnnnnnnnnnnnnnnnnnnnnnnnnnnnnnnnnnnnnnnnnnnnnnnnnnnnnnnnnnnnnnnnnnnnnnnnnnnnnnnnnnnnnnnnnnnnnnnnnnnnnnnnnnnnnnnnnnnnnnnnnnnnnnnnnnnnnnnnnnnnnnnnnnnnnnnnnnnnnnnnnnnnnnnnnnnnnnnnnnnnnnnnnnnnnnnnnnnnnnnnnnnnnnnnnnnnnnnnnnnnnnnnnnnnnnnnnnnnnnnnnnnnnnnnnnnnnnnnnnnnnnnnnnnnnnnnnnnnnnnnnnnnnnnnnnnnnnnnnnnnnnnnnnnnnnnnnnnnnnnnnnnnnnnnnnnnnnnnnnnnnnnnnnnnnnnnnnnnnnnnnnnnnnnnnnnnnnnnnnnnnnnnnnnnnnnnnnnnnnnnnnnnnnnnnnnnnnnnnnnnnnnnnnnnnnnnnnnnnnnnnnnnnnnnnnnnnnnnnnnnnnnnnnnnnnnnnnnnnnnnnnnnnnnnnnnnnnnnnnnnnnnnnnnnnnnnnnnnnnnnnnnnnnnnnnnnnnnnnnnnnnnnnnnnnnnnnnnnnnnnnnnnnnnnnnnnnnnnnnnnnnnnnnnnnnnnnnnnnnnnnnnnnnnnnnnnnnnnnnnnnnnnnnnnnnnnnnnnnnnnnnnnnnnnnnnnnnnnnnnnnnnnnnnnnnnnnnnnnnnnnnnnnnnnnnnnnnnnnnnnnnnnnnnnnnnnnnnnnnnnnnnnnnnnnnnnnnnnnnnnnnnnnnnnnnnnnnnnnnnnnnnnnnnnnnnnnnnnnnnnnnnnnnnnnnnnnnnnnnnnnnnnnnnnnnnnnnnnnnnnnnnnnnnnnnnnnnnnnnnnnnnnnnnnnnnnnnnnnnnnnnnnnnnnnnnnnnnnnnnnnnnnnnnnnnnnnnnnnnnnnnnnnnnnnnnnnnnnnnnnnnnnnnnnnnnnnnnnnnnnnnnnnnnnnnnnnnnnnnnnnnnnnnnnnnnnnnnnnnnnnnnnnnnnnnnnnnnnnnnnnnnnnnnnnnnnnnnnnnnnnnnnnnnnnnnnnnnnnnnnnnnnnnnnnnnnnnnnnnaatgcccatctttataccctgatctttacttgagcaaaaaattgggttcagttaagcaagcatgagacatggacattctaatgactcatgtgtggcccacactgtacctgatgatgggggtgtggtgctaaaaggggcctcaaagagctcactcagcccaggaggacagacagccaccctctaggccctgagatgtgaggcagtaagtggggggagtggttccaggggctggtgcaggccatccagcagaggggagggtggcttgtctgggaagtggtgactgggctggagagcaactctggaagaacacagggagcagatggacaggacttggtaacttacgggatgggagatgggtgggaagagagggaaagtgaggaggtgaggagtgacttcggagcccagacttgaagatgggctcctccccaggtggaggagctggaggggagtggtgcgggaacaaagcctgggcgagggctgggagaggcgggacagccgcgtaggcttaccactgggtggggccatgtgtgggcagggaagggaaaggaaagagtaaaaaggtatcaatactttacttattccttgaagatgccttgtcatcttgattgaacattccattccactgcaaagattttttaaaaaacctttggcctagatatttatcatcatctctgacaggtgccgcagtgtctgtgggccccagagcgtgatgggtaacaagtgctagataacagagtctgttctccagtcattcgggtggccagagaatagaactgaaagcaactcttgggtcacaatttatgccagggggagaatgcccacaaatgaatccaagtcagattcactgcttctgcagctttctccgttctcccatcactgggcaccacctcagctgctgggaaccaactgcatggatggatggccttcccagcagagacggtgccagataaagagggagttagcgtgtaattgggtgtataaataactgcagcctcttcctgaccgagggccactcaaagacagcaaggagcaggaggacaagcatggtctctgaatcacaacatcagggcctgaatccaggctcacgctttcttgggtggtcttaggcaagtcacaatttctctgggcctgtttcagcatcagtaagatgggtgcaatatgcccccatgcaaaatctcctaaggttcaaattaaacaatgattaggtattacttaccagcaagggataccacttttaaggaaaagacccacaacctctgaatcttggctacactcaacagcagctttgcgcttggcataatccccctcgctcagcacaccctctgggacagctgtggttatgtcagtgaatccttcgcaatgatgacaaaaagcagcaactcacgtttggccaaactggaagcacgcgccactggtgtccaacacctaattccaaccactctcacagcctttcctaggccaagaaacctcagcataagggtcacctgcttgccttggtctgactacctgggtgtctgcctatttctccatcccggcttttgagccaacacaagcccaggacaaggtcgcaccagcaactgggctcgctgccctcagcaccctcacgggattatcaaactgtgctcagtagagccctcttaggggccagtgggaggagaaagggggcacccactccacttcgagatctacttggagagtttacatattgcacgtgcagtggttctcaacccagctgctcaacggagtcacctgagcagattttcaaatgctgatggttgggtcccacctcagacaaactgaaaccaaatccctgcaaactgagcttgcgcataaatatttgaaacattctcctggtgattctgatacgcagccggagctgagaaacccctggctaacaggatcttcagctaaacatttttaaaagtttgaaaaacagttatggcaccatagtgacttatctcaggtgatagtgcccactacctgccagatggtgggataacaaagatcagcaagtaggccgggcacggtggctcacgcctgtagtcccagcactttgggaggcggaggcgggcggatcacgaggtcaggagttcgagactagcctgaccaacagggtaaaaccccgtctctactaaaaatacaaaaattagccaggcgtggtggtgcgcgcctgtaatcccagctatgtgggaggctgaggcagaactgcttgaacccaggaggcggaggttgcagtaagctaagatcgtgccactgaactccagcctggatgacagggcaagactctgtctcggggaaaaaaaaaaaaagatcagcaagtctcttttctaccctataatttctacatctgtcttactttcttcattggataaactcaggggagcaggatttatgtatgactcaacttccccacaaatagcaatgcagcagcaccattcagtagatacgaggtttctgccacgtcactgtgttacaccctcaggagacctcacagatctcacaggcactgcaatagaaagccacgtgcaacacacaagttattttcaagaactgcaaggatgcacccaaaaagcaggtgctgttacacaccaacaaccaccaactcggaaataagttaggaaaaccattgcattcacaatagctacagacattaagcttcacagaaaagtttcctaagtaaactctgttaagatccgaaagaaaaaaacccaataaccaatcaaaccgggcagaggacagaagcaaaattcagaagatacaaatggc

SEQ ID NO: 2244 - DNA, 2048 bp, Homo sapiens
ggcctcgggctgcctgcctgcctgcctgcctggcccggcccgagctccagcctgcctcttccactggccactgcctcccacccagggctggcatccctgctccctgccctgggtcccagactgtgtcctccatcaccgcagggtcggtgaggggctgggctggacaccagggcccgccctcccatcactgagctccactccttcctcattttgctgctgattctagccccaaacaaaacaggttgagctttttcctcccctcagaagctcctctctggctcgtggctgccttctgagtgttgcagacggcgccggccgggaaggggggcctgggccagccctgccaggactgggacgctgctgctggcgcctggccctccatcaggccagcctgtggcaggagagtgagctttgccgcggcagacgcctgaggatgatgccccagctgcagttcaaagatgccttttggtgcagggacttcacagcccacacgggctacgaggtgctgctgcagcggcttctggatggcaggaagatgtgcaaagacatggaggagctactgaggcagagggcccaggcggaggagcggtacgggaaggagctggtgcagatcgcacggaaggcaggtggccagacggagatcaactccctgagggcctcctttgactccttgaagcagcaaatggagaatgtgggcagctcacacatccagctggccctgaccctgcgtgaggagctgcggagtctcgaggagtttcgtgagaggcagaaggagcagaggaagaagtatgaggccgtcatggaccgggtccagaagagcaagctgtcgctctacaagaaggccatggagtccaagaagacatacgagcagaagtgccgggacgcggacgacgcggagcaggccttcgagcgcattagcgccaacggccaccagaagcaggtggagaagagtcagaacaaagccaggcagtgcaaggactcggccaccgaggcagagcgggtatacaggcagagcattgcgcagctggagaaggtccgggctgagtgggagcaggagcaccggaccacctgtgaggcctttcagctgcaagagtttgaccggctgaccattctccgcaacgccctgtgggtgcacagcaaccagctctccatgcagtgtgtcaaggatgatgagctctacgaggaagtgcggctgacgctggaaggctgcagcatagacgccgacatcgacagtttcatccaggccaagagcacgggcacagagccccccggtgaggtccggcttgcggacagcgcagcctctaggttctctggactgctgcacggaagtcccaagaccacttcgttggcagcttctgctgcgtccacagagaccctgacccccacccccgagcggaatgagggtgtctacacagccatcgcagtgcaggagatacagggaaacccggcctcaccagcccaggagtaccgggcgctctacgattatacagcgcagaacccagatgagctggacctgtccgcgggagacatcctggaggtgatcctggaaggggaggatggctggtggactgtggagaggaacgggcagcgtggcttcgtccctggttcctacctggagaagctttgaggaagggccaggagccccttcggacctgccctgccagtggagccagcagtgcccccagcactgtccccaccttgctagggcccagaaccaagcgtcccccagccccgagagggagcctgtcgtctcccagggaataaaggagtgcgttctgttctccttggtgtgctggggtcccgttctctttttctcctgctccagtgtccgagtgctcagttcagaggaggcaaaggaacaagggaaggagcctggatgtggagctccccaactcagccgaggcttcagctatagttggagaagaggcctggccccagttgctaggagctcccagactgccaaggagacacattcacacctggacagaggacacaggggtgcaggaggatgtggcaggggcaagaaggggctcagcagggctgcaatg

SEQ ID NO: 2245 - protein, 391 aa, Homo sapiens
MMPQLQFKDAFWCRDFTAHTGYEVLLQRLLDGRKMCKDMEELLRQRAQAEERYGKELVQIARKAGGQTEINSLRASFDSLKQQMENVGSSHIQLALTLREELRSLEEFRERQKEQRKKYEAVMDRVQKSKLSLYKKAMESKKTYEQKCRDADDAEQAFERISANGHQKQVEKSQNKARQCKDSATEAERVYRQSIAQLEKVRAEWEQEHRTTCEAFQLQEFDRLTILRNALWVHSNQLSMQCVKDDELYEEVRLTLEGCSIDADIDSFIQAKSTGTEPPGEVRLADSAASRFSGLLHGSPKTTSLAASAASTETLTPTPERNEGVYTAIAVQEIQGNPDAQEYRALYDYTAQNPDELDLSAGDIVIGEDGWWTVERNGQRGFVPGSYLEKL

SEQ ID NO: 2246 - DNA, 2105 bp, Homo sapiens
ggcctcgggctgcctgcctgcctgcctgcctggcccggcccgagctccagcctgcctcttccactggccactgcctcccacccagggctggcatccctgctccctgccctgggtcccagactgtgtcctccatcaccgcagggtcggtgaggggctgggctggacaccagggcccgccctcccatcactgagctccactccttcctcattttgctgctgattctagccccaaacaaaacaggttgagctttttcctcccctcagaagctcctctctggctcgtggctgccttctgagtgttgcagacggcgccggccgggaaggggggcctgggccagccctgccaggactgggacgctgctgctggcgcctggccctccatcaggccagcctgtggcaggagagtgagctttgccgcggcagacgcctgaggatgatgccccagctgcagttcaaagatgccttttggtgcagggacttcacagcccacacgggctacgaggtgctgctgcagcggcttctggatggcaggaagatgtgcaaagacatggaggagctactgaggcagagggcccaggcggaggagcggtacgggaaggagctggtgcagatcgcacggaaggcaggtggccagacggagatcaactccctgagggcctcctttgactccttgaagcagcaaatggagaatgtgggcagctcacacatccagctggccctgaccctgcgtgaggagctgcggagtctcgaggagtttcgtgagaggcagaaggagcagaggaagaagtatgaggccgtcatggaccgggtccagaagagcaagctgtcgctctacaagaaggccatggagtccaagaagacatacgagcagaagtgccgggacgcggacgacgcggagcaggccttcgagcgcattagcgccaacggccaccagaagcaggtggagaagagtcagaacaaagccaggcagtgcaaggactcggccaccgaggcagagcgggtatacaggcagagcattgcgcagctggagaaggtccgggctgagtgggagcaggagcaccggaccacctgtgaggcctttcagctgcaagagtttgaccggctgaccattctccgcaacgccctgtgggtgcacagcaaccagctctccatgcagtgtgtcaaggatgatgagctctacgaggaagtgcggctgacgctggaaggctgcagcatagacgccgacatcgacagtttcatccaggccaagagcacgggcacagagccccccgctccggtgccctaccagaactattacgatcgggaggtcaccccgctgaccagcagccctggcatacagccgtcctgcggcatgataaagaggttctctggactgctgcacggaagtcccaagaccacttcgttggcagcttctgctgcgtccacagagaccctgacccccacccccgagcggaatgagggtgtctacacagccatcgcagtgcaggagatacagggaaacccggcctcaccagcccaggagtaccgggcgctctacgattatacagcgcagaacccagatgagctggacctgtccgcgggagacatcctggaggtgatcctggaaggggaggatggctggtggactgtggagaggaacgggcagcgtggcttcgtccctggttcctacctggagaagctttgaggaagggccaggagccccttcggacctgccctgccagtggagccagcagtgcccccagcactgtccccaccttgctagggcccagaaccaagcgtcccccagccccgagagggagcctgtcgtctcccagggaataaaggagtgcgttctgttctccttggtgtgctggggtcccgttctctttttctcctgctccagtgtccgagtgctcagttcagaggaggcaaaggaacaagggaaggagcctggatgtggagctccccaactcagccgaggcttcagctatagttggagaagaggcctggccccagttgctaggagctcccagactgccaaggagacacattcacacctggacagaggacacaggggtgcaggaggatgtggcaggggcaagaaggggctcagcagggctgcaatg

SEQ ID NO: 2247 - protein, 410 aa, Homo sapiens
MMPQLQFKDAFWCRDFTAHTGYEVLLQRLLDGRKMCKDMEELLRQRAQAEERYGKELVQIARKAGGQTEINSLRASFDSLKQQMENVGSSHIQLALTLREELRSLEEFRERQKEQRKKYEAVMDRVQKSKLSLYKKAMESKKTYEQKCRDADDAEQAFERISANGHQKQVEKSQNKARQCKDSATEAERVYRQSIAQLEKVRAEWEQEHRTTCEAFQLQEFDRLTILRNALWVHSNQLSMQCVKDDELYEEVRLTLEGCSIDADIDSFIQAKSTGTEPPAPVPYQNYYDREVTPLTSSPGIQPSCGMIKRFSGLLHGSPKTTSLAASAASTETLTPTPERNEGVYTAIAVQEIQGNPDAQEYRALYDYTAQNPDELDLSAGDIVIGEDGWWTVERNGQRGFVPGSYLEKL

SEQ ID NO: 2248 - DNA, 2211 bp, Homo sapiens
ggcctcgggctgcctgcctgcctgcctgcctggcccggcccgagctccagcctgcctcttccactggccactgcctcccacccagggctggcatccctgctccctgccctgggtcccagactgtgtcctccatcaccgcagggtcggtgaggggctgggctggacaccagggcccgccctcccatcactgagctccactccttcctcattttgctgctgattctagccccaaacaaaacaggttgagctttttcctcccctcagaagctcctctctggctcgtggctgccttctgagtgttgcagacggcgccggccgggaaggggggcctgggccagccctgccaggactgggacgctgctgctggcgcctggccctccatcaggccagcctgtggcaggagagtgagctttgccgcggcagacgcctgaggatgatgccccagctgcagttcaaagatgccttttggtgcagggacttcacagcccacacgggctacgaggtgctgctgcagcggcttctggatggcaggaagatgtgcaaagacatggaggagctactgaggcagagggcccaggcggaggagcggtacgggaaggagctggtgcagatcgcacggaaggcaggtggccagacggagatcaactccctgagggcctcctttgactccttgaagcagcaaatggagaatgtgggcagctcacacatccagctggccctgaccctgcgtgaggagctgcggagtctcgaggagtttcgtgagaggcagaaggagcagaggaagaagagccaggagaggtgctgcgcctcatcccagggacactccgtcctcttggcctaggggagcctcccgaggccgcggccctcggctcagaacctcgtgtcccctgcagtatgaggccgtcatggaccgggtccagaagagcaagctgtcgctctacaagaaggccatggagtccaagaagacatacgagcagaagtgccgggacgcggacgacgcggagcaggccttcgagcgcattagcgccaacggccaccagaagcaggtggagaagagtcagaacaaagccaggcagtgcaaggactcggccaccgaggcagagcgggtatacaggcagagcattgcgcagctggagaaggtccgggctgagtgggagcaggagcaccggaccacctgtgaggcctttcagctgcaagagtttgaccggctgaccattctccgcaacgccctgtgggtgcacagcaaccagctctccatgcagtgtgtcaaggatgatgagctctacgaggaagtgcggctgacgctggaaggctgcagcatagacgccgacatcgacagtttcatccaggccaagagcacgggcacagagccccccgctccggtgccctaccagaactattacgatcgggaggtcaccccgctgaccagcagccctggcatacagccgtcctgcggcatgataaagaggttctctggactgctgcacggaagtcccaagaccacttcgttggcagcttctgctgcgtccacagagaccctgacccccacccccgagcggaatgagggtgtctacacagccatcgcagtgcaggagatacagggaaacccggcctcaccagcccaggagtaccgggcgctctacgattatacagcgcagaacccagatgagctggacctgtccgcgggagacatcctggaggtgatcctggaaggggaggatggctggtggactgtggagaggaacgggcagcgtggcttcgtccctggttcctacctggagaagctttgaggaagggccaggagccccttcggacctgccctgccagtggagccagcagtgcccccagcactgtccccaccttgctagggcccagaaccaagcgtcccccagccccgagagggagcctgtcgtctcccagggaataaaggagtgcgttctgttctccttggtgtgctggggtcccgttctctttttctcctgctccagtgtccgagtgctcagttcagaggaggcaaaggaacaagggaaggagcctggatgtggagctccccaactcagccgaggcttcagctatagttggagaagaggcctggccccagttgctaggagctcccagactgccaaggagacacattcacacctggacagaggacacaggggtgcaggaggatgtggcaggggcaagaaggggctcagcagggctgcaatg

SEQ ID NO: 2249 - protein, 288 aa, Homo sapiens
MDRVQKSKLSLYKKAMESKKTYEQKCRDADDAEQAFERISANGHQKQVEKSQNKARQCKDSATEAERVYRQSIAQLEKVRAEWEQEHRTTCEAFQLQEFDRLTILRNALWVHSNQLSMQCVKDDELYEEVRLTLEGCSIDADIDSFIQAKSTGTEPPAPVPYQNYYDREVTPLTSSPGIQPSCGMIKRFSGLLHGSPKTTSLAASAASTETLTPTPERNEGVYTAIAVQEIQGNPDAQEYRALYDYTAQNPDELDLSAGDIVIGEDGWWTVERNGQRGFVPGSYLEKL

SEQ ID NO: 2250 - DNA, 85803 bp, Mus musculus
tcaaaggcatgcgccaccaccgcccagccaaaggggctacttttaagcaatcatatattatgggtccactgaccctaaaggtctagtttgttggaattatcaggcccttccttaggctggatcaactcctactttagctccccaatttcctattttcaaagactgccccctttttttctccagactgttgcttttccttaatattccctcagttagttgctacttggcccccaagttggatagaaagtaggttaggagccaactatggtagtatagatctttaatcctaatacaggaaggcagaggcaggtggattgctttgagtttgaggtcactttagtttacatagcaagttctaggacagagagaccctgtctcaaaaacccaaatgtaacaaaagaggaagtagaggaggaaaaggaaagaaatgacccccatcagtctttttgtcttctctatggtacaagagatatctgaaaactaaagagtgaacttagcaagcctcctgggactcctaatttatgtcttagatttgtcttgggcctgggtccactggccacagttaggcaggagtagaaggtacaccagccaggaggtcaggcttagccctcaaacagggttttccactgttttgcacttgggatgttgtttagtctccctctacttttacccacagccttcatagtgcctttctcctagttcagttaaacttggcattaggctaaggccttggaggtcctagctaacttcaatagactctcactaggaatgataggtacagggtgggagctatggagccttcctaaccatttaaggtagttaatatgttcccgatggcttctgggactaaaggccccccactttagactgactgctctgtacctgtaaccatactgaagtctagtggttttctaagccactgcagagttttgttttaaaaccttcaggtccattcagatgcagagcagagcagaggtcaacagtttcatcttgtggagtctcttcattgctttcctgacttaagtacataccctacaggggctgctgggaaaaggcttgagtgaacccaaactatacctctatctcttccatagtgggcttctcattcagattttatttgaacaggggaacctgttattacaattaccactggtctgtaaaacaataccagagaaactggaggaatatactattcttacatcttttttccttacttagaatagtgaccctgaggggtcaactggtgttcagtgaggagaagacatttccaggtactgtaaccccagtcttcaaacccactaaaaaaatcccaactttccaataagaaataatgcaggagctgggcgtggtggcgcacacctttaatcccagcactcagaggcagaggcaggcagatttctgagtttgaggccagcttggtctacaaagtgagttccaggacagccagggctatacagagaaactctgtctcaaaaaaaaaaaaaaaaaaaaaaaaaaaaggaaaggaaaaagaaataatgcagtacatgccattgagggtaggatgtctgcagtgccagggactttctttgaatttaaatggccaagaaagaagtatggtaactttgagaaaggaagaaaaagtgaaggattcttaactgtattctagacatatttattttaaaatttccagcagtccaatgtaatacagaatcttactaatcaacagataaacaatttacttaaataatctagctaggaagtggttaaacaaacagactctgatcaatagtttccagggttcccctcctcctagcttgaatctaggggatagacagaaggatcaaaagttcaaggtcatctttgcctagttctaggccagcatagggcttgagagggctattctcaaaaccctcaccgcctaggagtcagggtgagagctcagtctcctcctgggtagtgctgagctgggggtggtaatcagctctgacagcagtcaccgagtaaaagccctaactgaatcttaaggcaagaagagcacaagcagagggggctcaaagtccacaaggtaactagcaagatcctgcttcaaaattttgtaaaagttaaaaagagctaagtacaatgttcatatttgcattactactactggggactcaggagcctgggaaagatcatcatgaacgcctggccagcctggtgcatgtgaaacctggtccaaaccaaatcagaccagaccagaccagaccagaccagaccaaaccattttttgccacacaaaatgaagacctgagtttgacttccagcccccatagaagtcgatatgggtggcagatgcttacctccagcagtgggaaagagaagatgggcaagaggcattgtcctgtgagtgagtgcctttttgtgaatgagagtgtgcatatctcatgtccatgaaatagactgaaggttctgggatgacagtttcaagtatatacattgtgagttaaagactggtgtctctgtgtggctggtagacaaatcctgtttctttgagtacacttttgctagaactacctgatgacaaactgctgttagaattaggtaggtaaggtgtgtgcttcaggaaggaaggctcagtattttctccaaagtcttcgacttggatcgtagcctgagtgtatgcagaaacagcatatgggagatgaaacaatttcaggacttggacttagataaacgtagcttggctacttcatgtaggtaagcccctccacggtctgtggcctcagactcgcagggtatttcacacacaggcatgtcggtttcccaaggagaatgctcacccagatccattcaattgtactttcactagtgggccagtaagaaatgttgagtgtccatataacactgagtcagaaacagttactgggttccccctggtgccccttgaatacagagaccccaaagtcaaattaggtatagtcgatgttcttaagatctcaatctaaagagtgttcagaaaagtctaagcatcagccatatctttctccataatgagggtggagacatagctcagtgggtaagaactcttgttgctcaagcatgaagacccaagttaaactctccagctcccacataaaaagaccagtatggtttttttacatacatgcctgtaacccaagagctggggagtagcagatggggaggcaagagaatcaatggaacttgctgaccaacagcctagctccagattcaggaaagaccttctctcaagggaacaaggcaggggttggtagcaggacacttaacatccttcaactatgcattggtgcacacaatactgtatgggtgcacacacaggtacacatatgcatgcatgtgcattcatgctcatatgtgcacacacaaaataagtaactttatctacagcatgtgccacttgctgtttaggataatagtcaaatgcctcagcttctggcctccactgagattcagaaactgtataaggtaataattgtattggcctcaaaacagggaaagagttattatccttagagaaggctgagccacaggtgagggtggactaaatgggagccaacataaatggggctcagcatttctgactagtgttctctctgtagtaccactgtgcctcacctcagtaacgcagtatctatttatgccttcagctaaaagttgatcctcattctagagaggatgaacactgactttcacggctgtgtcaggcctcacactgaacccactgtcctcatcacctggcctttgccactacacagttctttccagctaccacagacattctagctcctgtataccaggtggaatgccattgcccttcctaagtctgtacttctcacctgtcctgtctccctcagtgacagctttccacatggactccagtcagggaaggatcctaacactatctttaaggaccccttctctgtagacccatgctctccctcatttttctgggaactgaagccctgaactaggaagagatttacctgaacacaacactggctatgccaaccctctttcatctagtaaccacagaaggccactggctacctcttctgttatctacactgagccagctgcctcctcttccttgggattattctcaagtagactctctttaaacgagatgagatccactctgtagcctaggctggctttggactcaaggtcttattccctttgcctcccaaatgatgagatgacaggcatttatttatcaccatataaagcattgtaaagttcttataaataactaggttgttggcatagtcatccagctgccagagaatcctttcctgttcatatcctacctgatacccaagctaactccctttcttcaatgacctccaaaataagtggttcttgggggctgggctgtaactaaatgggaagagtgcttgcctagcatgtatgaagtactaggtctgatttccagaaccacataaagctgatatggtcatgcacagctagaatccaagtacttggggaggttgaagcaggagaaaatgccatctgctatgagtttgagatcagtctgggctacatgacatcctgtctccaaaacaaaacaagcaaaaggatggaacaacaacaacaaaacagtttcttgctcaaaccacgtgctttctgctcagctcttttgaacaaatatgttactgataaatagcaaatgaggcagttaagagcttcatctgagggctgctcaaaatgaggagacttttctggactaggtgatgaataggggacaaatttgccattgcttttcccaatctattccccaatccaagatgcacctttgttgccagtaaactcaccagtccaacagcctctgtgcctgctatgtgtgtgtggcactctttgttcagactgctagctaaacagaattactcatgttgaaatgactgtggatctacttagagagagagagagagagagagagagagagagagagagagagagagagagagagagagagagagagagatagggttgggaaagacttcgccttacttcctgcagcaagcatctgagtgtttggaggatatcgtgaatattccagccagtttaaaattgcactagatagcagacagagtgaaatacctgattcacaccccatagcggctcagacaagtgccagttttccaggttttcggaattcatggctgaaaggcaccttacaatgtagactggacacacgtttaacagccaggaaagtctagacgttgcagccaatcgctacttacctctaatccaaccaaatgctagccaggccggactctgtttagcttctgagatatgatgcgtccaagtggtagggccatagactgttacaggtttctccagacccagctccaaatgggttgtgtgtgaaggaaaccggggccgtgtagttaagatgcacctcctttagcttccaccctgcggaactccaaatcccaaaaggcctaagtccgaagtcctcgaaaaactccaagtggcggtgtgagagatgtaagagcctctgctttggaggcgactcttactcgtggatagtttaattatttatttttatttcggtggaggcaaggggcgatcaatgaaggggaaggggcggggagagagaggaggcggacccattgggactgacgtatacgcaggaaagccaatagatactggggggcgttccctctcattcaggactcctcgcctggttccggaggtatgttaaacagctgcttttaatttggtctccccaatttcggtattttgggggtctagttctttggtcgcttgctttggctgcacaaagtctgtgtgggtgctgcagtccccaagacagagctacggggaggctcggagtcccgcggttgaggtaggctaggggcaggccaggaaggagagcgcttggcgccgcccgctcgtagtgtgtttccaagcagggctggaacggtggggagggggctggcccggcctgggtcgccctcgcgccggccgcgccgcccaatttattttaccaagcagtcggtttcgataggtttaggaagctcattggggaatgggccagcagaagaccaactgctcttgtaaatgctttaaaaatattttaaaaaataattataaagaagaaaaagagggaagagggccctggttgcggcgagcggcctcggcagggggcggcggccgcagcctggccagtcgggcccaccgagctcacggtgtccggagttggtcgaccgctggagtttaagagcaagccgggccccacggtctttctccgctaaccacgctgggcgagtgcagtggccgccctgagcgtttgcttctgccggcaaacttggaagggtcgtgggcgcgctctggggaggcgcgggcaccgtgggcccgcggttgttaaggactctgggggcgggggcaatggctgtatttgccggaggagacttggggcgggagaggttccagccactagcctgggagctgccggtgtgtccgaacacggcattttagcaagtactcggctgcagaaccggctagactgcggtccggcgtggagcgcttgctgagtgtagaaaagctctaggaactcggcggattcaattcgcggccccagctgatcccctcgcaaacatggagctgcctccttccccgcccacctcacggccgcggcggctgctccccctccctgagtagtgtgtgtgctgccggggctccctcttccgcgaggtgccgctgcgtgccacagggccgcgtacggggagggggcagccttgtgcgcgcgcgcgctcacgaaggggtggcctgaaaggggcagtgaaggtcggaaactgggaaaacagactccacgcttggaatagggaaaaggaaatgcatcagcgggcggggaggggcgcgcctgtcagccggatggcggctgcgggccgagaggcggggcaccggagcaaactgcgtgcagtggcggtgcaggcggggagggcaggcgcagggccagttctcgaaatgcgcggccatctctgcctccattgcctggccaagactgtttactatctcttgcagggagcttgtgcaaccggcctggaggggacccgagaggggcggggacatttcctcttccacccactttgggttctccagaggctccgccttctcttgtctttcactggttggattcgagtccctctttcccttctcgtgtatgcattggatgatattctctagagctccgcctatcgggaggttggactggagtttaagttgctaaaattttttttcttcgaagggcggagggaggattcctggggcttacgtgaggtacaagcccccgcccctgtttctgattggcgaattggataggccttccccttctggggtaagctaggaggagacgttctcctccctgccccccctttctcgtgagcgcgctcagcacatggttgaggcccttttagctccctgcaacttccctcccgcccggaagtctcaggctccgcgcccttagttaggggggcggggaaagccttggaggcacacaaagattcttccgagtctagggatcggctagccttcgaggtgaagcccgacaattgcgctgttactccagaaagcatcgctccagggctgctgcacggaggggagggaatgagttctaccctccagcccgatcaacttttgctgtttttctccgtgccccttgacttccttaaatttaagtttcagaaagcttggacattggccgcatccttaattccttgtgcaaggcaatcttgatccttagtcggcggaatctaagattatgacaacctagtaatggaacctttggcaagatctacgatacctcggtcgctgcagtcaagggaagtccgtgaggctcatttctagcaaggattcgggggtgtttgttgataccgtggtgggagtgctgtacattgtatggtaggtacccagcctggtgggtaaggcagttcagttaaggataggcatctgtcagttttggagtgctacttcagcctggaacggtttggctagtttttcttattttagagcactgtcctggaacagggcttggcttggctaccggtgtggctgctcccacctgtcggccactcttggagttcacaactctttactatggcctcacgccgtgaagccatcctaggagttagacccacctgttgccaacacttgtttatggcagtctccgcaggatttacaggaggacagtattggatttacgaaacggttccccggtgtcgtatctcctggggacactcgactctagggaggttccctctcccccttttgctctagaatgcggtaagactaatcccacctaacctctcatggcacagcgaaagcctccccaaagcaaggtcggcatcgggcccacgccttactagtgaataaataaaagaactaggtctttattattattattattattaattaattaatgtattatatgtaagtacactgtagttgtcttcagacactccagaagagagcatcagattccattacggatggttgtgagccaccatgtggttgctgggatttgaactcaggacctttggaagagcagacggcgttcttagccgctgagccatctcaccagcccaagaactaggtatttcaaagcactttttgtgttcaggcattgttacttacccagaaggcttagagaccgccattaactcactctgctaaggaggaatgcccaccccccttttttttgaagggctggccttagggttcctaaattcagactattcctgccctttcgcgaatggttgcgattacagcccttccccttgaacagtcattcttaagaccatatccttcacacaatctggaatttttactccttctgtgaacgtaagtgcacactcaaggtttatttatgcagtggtctgtgtgaggttttcagcctctcttcctccagtttaaaatgtccctggatctacccgaccaatagagtatacattttcccttcatgctccgccttccggaggcttgcccaggcggtgacatttaaaggcctccgctgggttatctccgccccctgagggctgcagattctggttgtcccagtgtcacagtattcagtcagccctagtgaccagctagtaatatctgggcttttggatcagattagagctccagaccttaattttggagtcggcttgctgaaagtagctgctgagtgctccagatggctgtgtttagaagaccgtgaaagtgtaaaaataagtgggtaggaaggacaaggctttctgtcattgttttggttaattctccacggcgggtaatactactgccttttccttttcaaatctcaaagcctcgggtttcggccgctgagctccccgccatctccgatcccggccttggaacgctgaggttcagtctccagtgtaaacattccacaaaaggactgctaaggttcagcatcctcgcgcagggcggaatggtctccttcctggaccggcgccgtgtccaatggcggctcctaccggcgccaagatagtccaatcagatcattgggggcggggcctggcccagccgtgtagtgggtggagtcggcctcacttaaggacatttttaccccacattggttacttaccttcctggggctatgagagaagcaaaggtagtcttccaatgcagggaccggcggaggcgggagccgatttgttaggcctgtggctggggcggtatggggagggatatgtgagactctccaatgagatgtgaagaggtactcctcttcctccaatagtattagagcccggaggagggattcggcaatcagtctccaataggcggggttgagttagggactctccccgccaataggggcgtggagaaggtgagcggctcgctctcccctcccagcgagggaagagggcgggagtaggtctttgcggcatagtgattggctaaaccattgacggatgggtaatatatcccgtggcggagcgaggttaagccttccctcggcggggcgggccgggagagtgggcgggatttcccgggtaacagagaagcggccgcggcggtagaggcggcagagacggtttctccatcttcccccctccccttccccccttagagtttccctccctccctccctccttcccagtctgggcacccaggcctgtgaccgcttcgtgggcgcaaaggaggttgccagtccgctcttgcgggcctgtgcccgcgccgttccggggcctccgtgctgggtgcgaggctcacgccgggagcgacgcacaggctgagtggctggagcttttgcggtgagagcacgccgcaccgcggtccgcccagcagctgggtggcgggtaacccgggactggagggcgtgtgtttttcgggggggctgacctcggcttcccgtgcgtggctgtggggggcggagcggagccgcactcagtgcgggagggggaggagagcgtagtcccggtgcgcacggaggggcgggtcctagtcccgccgatcagaggcggggccggcgcgcgtgcggtggtggagaaaggggcgggacgggctcgcgctaaaggcccgcggctgtgaccccgccccttctcccttatgggcgggaccactggctgaactgctttgggtccgcggggcgtgcgggacgggaagagggtcccggcgtgtggctttcagggcgcggtggcgagggggcgtgaagcctgtgttcccccgccttagcgggatccggttggccggaaggcgcgtccggggctgtgatgccacgcccctcccgccccgccccctccgggatttccgcctccttagcagtgaagaggagctggggaaagcccgctgtggcgtctggcagggggtcagggctccgtgtctgctcctcccagcatccccgtgggtgggagggccccttgtagactgggaacggtggaggtgtccggactttatgctgtggcttcttcatccattctgcttggggcatcgtggcccgtagctgtagtcttctactttgcttcacacaccatggatggcgccttaacagctagggagagtagaagcgtggtcagctgctcctcttcgttgtaattattgggacgagatactcagcgtcctctctggagtgtctgcggtggggtgcggctggtgctgtgcccttgcttccccgacagtggccggtgggggaggggcagagtgatcagggactggaattgtggagggcgccaaccttccctggagttcccttgatgttcagctactgcgcctttacgggttgatacctaaaaattgctaccatttttggtagcttaggactttaaactcagtttaccatttgagctcctaacaaatctgagattttatttctagagaaagtattgaatttatgattgtaagtgatggagtgagtttagggcacataagcattgcttcaccgctaggctataccccaaggctaaattttttttttttaagtcaaagatttaactctctttaagtaaaatactctgatttcttgactgatttcacctacagaaggttttgttacataagcttagtttcacaaaggtaacttagaattttgtgttctcttttggttttatgtaacttctagtccttaaagcttcatgttgctctttttagatactaagtaggttgaactgtatgaaacctatgtgtagcatagcttaccggcctgtgttagagagttactttggccattgttggtttactgcacatgtaaccatattagatgatcttactcgagaacttcatgaaaagtgaacatcgaattcttaatttatgtattgatatctgagtatgtgtaaaccacttttaaaaaagatttatgttaaagtgtgtgtgtgtgggggggggcagaataggatgttagatctcctgtaggtggagataacaggtggttctgagccacctgacatggaacccaacttaggtccttttacaggagcagtctgcactgagccatctctctaatctcatagtcatgtgtaatttctgaagctaaattctggatttgttctttgttcagtagaggctgaaaactgtgccctgtgctgtacttaatgaagaggttaaatattcacttttcagctaaagaagtgacaccagccatggtaacagaatggaggtggagcccaaaagataaggacttggatgtactacagatggagtacacttaaaacgctagaagagaattctttggctttgaggaaagtttgaccaacccatagttaattttaccaattgaagtacagtttggaaaatcagatgacttaattcatacctttttttttttttcttgtttttgaaacaaagtttagccctgggtgtcctagagttcaccctgtagtctaggctggactcagactaagagacctgcttgcctctgccccccaaacactaggattaaaggcatgtgccaccactgctgagcataattcttatgtttatagaatgtgtataataggttgtgtactggagtcacaagtcctaggctttgaaatttcaagaaccttgtttttgcttgttttttttctcctatccatcagtatacgtttgttatttttgcatactagcatttaggaggctaagcagactaagtggtgaagagtgagtattactctaagaaaacctgagttcagttttcagcaaccatgtcaacctgtatctcaggctccaagtactgacacctccggcctctaggacacagacacgggtgcacacccccacatccatacacacagtgaaaaataacagaaatacagctttgaaaaataaactgttaatacttttaaattcaggccttaagtcgtgtgcataaggaagttttttctttttttaagacttgagattggtatttgacaagattcctggtaaagcacagccatcttgacagtgcagcaaatatcctgaaaggttacccagggcagctgtagccgggaaactttacttagaattcagaggttgtgttcacggtcttcagtaatctagtatagtgttttccccccactaaaagtatgtcaaactatatcttttgaatgttcttttaaaaagttagtgcttgagccggtcgtggtggcgcacgcctttaatcccagcacccgggaggcaaaggcaggcagatttctgagttcgaggccagcctggtctacagagtgagttccaggacagccagggcgatacagagaaaccctgtctcaaaaaaagatagtgcttggtttttcaaataatagcttcccttttgtaataagggtttatatttattgaacttggactctgcacctggtactgccaggcactgctcattcgctaatgtgtttgattgtatgtgcatgcatgtatggatggatgtctgttagtggtatacacccatgtagctttgaagttttgtggcagctttgagttgtggattggtgggctgctcgtttatctgaacttgctctggagcacagcctgcctagaactcagtgattctcttgtcttggcctcagctagggttacatctctgttttgaaatgcatgctttacaagtgaaggtggctcatgaggtagcttcttcaatgggtaaggacacccgccacgcaatcgcttaagactaagttagatcccaggaatccactgtggaaggagacagctaactcccgaacgccgtcctctgactatcacatctgtgcaacctttctaagaataactaaattaaacatttaaagacaacaaggtgagggctggggaagtacctgtcagtaaaaatgccgctgaagcaagaagacgtcctattcctgggacatgcttgaaaagctggccatggaaatctaagtgcagcctgggcctgaactaacactgggagcagtacattgtagagggaatccctgatgctagcccacttagactaacccccaggcattaaaggagcttatttggaaaatggacttttggagtgatgtctgaggttgagctggcttgcatatacacaaatatagactaaatggggacagcagggtggctcggtaggcacagcacttgctcctagagcttgaagagctgagtttgacccctggaggcgattagaggtgaacttttgtatgagtgcccacatagatacatcatacacatagagtaatatagctgtagtcccagcacttggagctagctacaggaagataaagaaatgttcaggcagtccttggctacttagggagtgtgactcaacctgggctacacaagaccctgcctcaagaacatggaatgagtgactgtgaaaagtagcacatagaggcttagtctacacaggtgatcaaacagccaggtgaaggcctccagtgtcctcagctgtgtaaagctatctctggtttatgatggaaagctatctctggtttaatcaaagctttccgagtgcttgcctggtatgcctacatccctgggctcagcctccacaacctggtaagaccaggtatggggaacaagcctgttgggaagtaagttgaatgtcatttttaactacatagtgagtttgagaccaggctaggggacatgaaagaaatcctaacttataaagaaacaaattgtgggctagaaagttggctcagcagttaaaaaacacatgtttccaaaccttgagtttgatctcttaagactcacattgtaggcttctgtcacatatgcatggttcccccaatataaatagtaaaaactaaaataaaaaatacaagacataaagtgtaccattatgatgtaaagtttctcatcttttttagttcagttcggtggcattaagtacactcacgtccttgtgcagccttcgccaccatcctccttcagaactcattcatctctcacagttgaacctttgcacacatgaaacagtaagtctctctttttaaagataaatttctattttgattatacatgtggatgcagatgcccttggagaccagacatgttggagttgtggtgaagatggttataaaccacttgatgtggtgttgtcctggctgccctataactcactctggggtccaggctagcctgaactgcgatgtcttttacctaggttttttcctcccagttcactgatactgtaatgtatgtcagaatttctctcccttaaatacatatataccacaattatttatcttttagttggcatttttttctaccttgtggatttatttgtctattttcattttctatgtatgttttacctgtatgtatgtgtttgtattatgtgcccaaaaaggctagaagaagacatcaggttctctgggactagagttacaaactgttgtgaacctccgtgtatatgctaagaactaaacctggtccttctgaaagatcaggggtgcttaaccactgagacatctctccagccctactttgtgcttatgaataattctctgggaacatggcatatgaatttgttcaaatccttgcttttagtttttgaatcattattcagaggtggtaatgtagtaatcgtttttattttgaggagctatccgtgtcaaagcttttggctttgagaaaaaaaggttgggggatagagagataggtggagagatgttgcagtggttaaaagcactggctgcttttccagaagacttaggttcaatttttagcattcatggtggcacgcaaccatctgtaattccagttgcagatgatccaaaaccctgttctggtatccaggcacagaaatggttcataggtagacatgcacccaaaaataaatacatcttttttgttttgtttgtttttgagacaggatttctctttgtagccttggatatctctctagattaggctggcctcaaactcagagatccatctgtctctgctttcagagggctgggattaaaggcatgtgccactgtcctgctaaaataaatacatcttagaaaaagagattcagacttgaattctgagagtgaattgagacagcacccgttaattgaccacctgcttaaataactctgggctgatgtacaacagtctttgttcctaagaatttcacactcttgtcagaaaaggcaggtagacggatgatttcaccacacattgttgagtgtcttaagaatgacctttatctgtaggaggtgggggaggtacattgcatttggaaggcagcactccaggagagactagaaagtcctggactttagactttgtctaagctgctgagtgtccttaggcatcttgcagtatcactgatgggaggggcagcatcatctggaaatcagattttctcctgctgagccctcctctctccagctctcgtgagcctttttttgtgtgtctgtgtccgtgtgtgtgcttgtgtataccctcacatgagtacaggagctcagggaggcctgaagagtttggattccctggaatcggagttacagatgcttatctgttgcctgaatggttgataggaacagaactcgggtccctctgcaagaacagtatgtacttttaattaccaagccatttcgccagcccctgaagtctaatttcttgatttatttctcagtgagattacagtatactcaacacaagtacttgacatagattgtactagtactaagagaatggtgtgtgtgtatcatacatgaggtcacagtgtacatattgtatggcctattttcacttagcatgttttcatttgacgaagagcactggtatttgtaatagttgttcagtttcccacaatatggatgtagctcagttagccagtgcctagctaactcagcatctcgtagtctgctgcagcagttaaacttggcagaagtgtaggtcagagacctagaagtgggttgggtaagttaaaaagtgggcacattttaaattttcatagaatacctgacaacaaaataaactatacttttgtttttgttcttttgagacagggtttctttgtacagcttaggctggcctcaaaagttacagagctctgcttcccaagtgttgggattaaaggcctgcaccttcaccaactgacttaaactctatgttttaagcgcttctaagccaatgagatggctcagcaagtaaagctctttctcacacagacctgacaacctgagttcagtctgggatccaagtgaaaagcagagtatagtagtgtgcatttgtagtcccagaattccataagacaggaggtagagacaggacagtctcctgggagctcatgaaccagctagcctagaggaagctttggtggagcaaaaccctgtcttagccgggtgggaggcaagaacttagtcccaaagttcttgtaaccctcatccttgagccatgatgcccttggagcagagtgacagactggtagtgagctaccatgtgcatgctgggaattgagccctggttctttagaagggcagccagtgctcttccccaccaagccaagccatctctccaggtccgtgggttgaatttaaactattgagaagcgagtggtagatgaggtttacatttgaggggtgtgattgattgattgattgattgattgatttaatgtatgtgagtgcactgtagctgtatagatggttgggaaccttcatatggttgctgagaattcaatgtttaggacctctgcctgctctggtcacgtagctgacttcggacgaaccagaagagggtgtcagatttcattatgggtggttgtgaaccaccatgtggttgctgagatttgaactcatgacctttggaagagcaagagcagtcagtgtcttacccactgagccatctcgccagttcttgaggtgtattttgaaagcagtatagagaatggaggagagatgcttggaaagtatttatctgctgtctggatgaaggatgctaaaggctggaaggaaaggagtggctgtttttctaaaaggaaagtgactagttggaggtaggaaattagcaaaggaatataattttaaaaagtaactctgaataccatcttttcagtgttttttgttttttttttaaagactgccttccaagtgctgggattaaggcatgcaccaccactgcccggcttggctgctacttcttagctttagattttactggtttaaaacctagatgttgttaggcagtggtagcccatgtctttaatcccagaattcaggaggcagaagcaggccagcctgatgtacagaagagttccaggacagccagggccacacagagaagaaaccctgtctcaaaaacacaaaacaaaccaatgaaacccatatgttaatcttgtaagattactttctaataagaaaccagttttttataaatgataaaccaaatatacatgaagaacacaacacaggactatgaaaaaaattttaacattctttaggcactgcattctaaccaaaaatctcacttgaaattttatagctttggtcccattgtatgtgatttttgtgatgttcaaatgttattccatgaaccagtttataggaaaatgttaaaaagataaaggggctggagagatggctcagcagttaagagcactagctattcttcagagaccctgagttcaattcccagcaattacatggtggttcacaaccatctgtaatgggatctgatgctctcttctggtactcatatacataaaaataaagacatcttaagaaataaaataaaagcctggtggtggtggcgcaagcctttaatcgcagcacttgggaggcagaggcaggcagatttctgagttcaaggccagcctggtctatagattgagttccaggacagccagggctacacagagaaaccctgtcttgcaaaacaaacaaacaaacaaacaaacacacaaaaaaagaggtagcagccaaaagttcttgaggactttgtaggccattcatttataataactggtttctcatttcaaaatagagataatatatgtatatggtgtgtttgtgtgtgttggaggctgtgttgatgtttgcacataagtgtggtttctttggaggctacatctcttgtaagagaggtttcagggagttgtgtgaccttaagaagtgtgggtgttgtgattggaactttagacttcatgattgagcagtaagcacttctaatcactgaagcatctctccagcccctttgctatttatatatttcttctgtatacaagccaagcacaggtgtgtatgtgtgccagggcatgtgtgtgaatgtcagagacagttacagctgccccttcttttcccataatgttaattccaggggttgaactcagactgtcagtcttggcagcaagcacgtttactcactaagctatcttgcttccaagtattccttcttaactatagtggattatgttgtgttaatggtactgatgctggaaatgcttacaaaaaaccctctagtatgtttctggataaagtggctctagactttgtgtattctttcaaaagaatgtctcctattgttaagctgaagagacttgtatgcaaagggtgtgagaaagggccagaaggaaacttggaagtcatctgttctctcattctcagtgtgctttgacagtgtgtgagtatgtaactagtattaactccattagtatctcaggagctaccttccttcagttactgttgtattgctgtgaagaaacactgtgagcgtggcaacttaagagaggaaagacatcttttgaactggggcttgcttatggttcacggaacatcatggtatggcagcaggtccatgaacatcatggtatggctgcaggtagacagtgctcaacagtagctgagagctcaaatgttgagatacaaccaagaggtttagagagaagggggtttcaggaggtaagtgggaatggtgtgggttttttaaatccccagtgacatatctctaacaaggccacacctaaacagtccatcaactaggaaccagacattcacatgtgtggcttatatttgagccattgtcattgaaaccatcacaggagcataattagaaaaggagagtttaaaggttttttttgcaattttgaattgtaggattttttttcaatttagtgttaccaaattgattaaaactctgttccatagccttctgtctttcagttcttatttgctcactgtaaggtgtgggtcattcattcagagactcgtaagaagttgattagttatgaaagtcagacttattaaatttgggcgactggttctaagttatgtgcatcatactggagtgagattttatttgtgttgtcactttgtggtttgtgtaggtttgtagtgcatccctgagcatgagtgcagaatgaagcgacgtttggatgaccaggaatcaccagtgtatgcagcccagcagcgaaggattcctgggagcacagaggctttttctcaccagcaccgggtccttgccccggcccctcctgtgtatgaagcagtgtctgagaccatgcagtcagctacaggcattcagtactcagtggcacccaactaccaggtaagctggggtggcagaaaacaggagtaggggtggtttcattcattgaagatgatttttgttaaacattgagctacctaagaaaaacgtcataaagagcgtatgacatgttttacaatatatgtacatgaagcttaagaaccactagataagttcaaaacagtaacaacaaagtcatgtcatgacctccgaggttcttttcctccccttcataggtacccctattttccctttcttttttcttgctcactcctcatggccttttctctcttcaatgagataggatttcattatatagcccagattagccttgaacttttctgtcctgctttatcttcccagttgtgtgattttaggctctaccaccttgcctcacctgtgtgttagtcaagattgattgcagggtcttgtttgtgtcaggcaagaattctaccactaacccacactttataacccttctatgttacaaccatttctatttatgtctcaaattaacataattgtttagttcagatagttttgtattttatgtaagtagaagaacttttttcattttttatttttagtttttggttttctgggactgggtttctctgtgtagctctagctgttcttgaactcaccctgtagaatgctggccttgaactcagagatctgcctgcttctgcctcctgagttttggaattaggtgtgcaccaccattgctcaactattattattattattaattattaacaacttaatgtggtttatagtagcttttactttttaacatttttggtcttgagggagggtctctttactatgtagccatggctggccaagtatagaccaggctgcctgagtgctaggaataaaggcaggtactactacacctggcttggttttttatttaatttttattttgcagtaatagagattgaactgaggtcctcacgtgtgtcagcaagcacttgaggatcagttcctcaggggtctcctctgaagcaaaagtagtgcttgcactggaggccgccttacgtggcaggaacagatgagtcttaaagaagggtgttctgcttgtgagattatgtttactttccagataggtttacagttatgtcctctgctagatatatgtgtacatatccttactggaaactagtatgttcttgtaacaaaacaagccatttcagatacttagcaagaatagttaatactgctgtgttgtttcacctccgagttccagaaacctaatccacagccctggcttactggattagcattgggcccaatcttcagtccatataattaattaagttggacgaaaatctgtaaaatgttttcctttctccctccctccctcccttccttcctttcttttttatttttgagacagggtttctctgtgtagccctgcctgtcctggaactctctatagaccaggctggcctcgacctgcctctgactcccatgtgctgggattaaaggcgagtgccatcacacccacagctaaaacaggtatttcgaaaggaaaagcagagtgattgatagcctttacatgaaagatgtatgtatttgaatttgaaggatttatttaattttttttcctcgtttttaagataaggtttcttacagcccagattgtccttgaatttgctatgtggctgagggtgacttaaacgtctggccctcccccttctgtctatcttcgattgttgggatcataggcaagcacagcacatcaaatttgagtactggaagtggagtcaaggtttcctgagtagtagacaagtatctgtcaacagagccacatttccagcccctaaatgtttttttatccattctcttaagttttatatctgattttacctattgttgctttatttctctgtgtccctgctcacggtaagttttgaagataggtgaaaaattttcttgtttactaagttgaagtatttatactgcttagagaaagtacattttacattgctcagtttccttatttggggatgaagcagttagctatactgattttaagacagcttccaccccttcccccatttacttgttttggttttagaaacaggttctctctcggtagttgacctagaatcactgtctagtccctatagtcctcacactcggaccagtgcctcctgccctagccctgtaaatgctgggaatgcaggcatgaccttcccactcctggctttgattgacagttttgaaataggagaacagaagtgctctgaaaatttattattaatgttattattacattttgagaatagctctgacagtcctggaacttactgcatagatcagacgtgcccaaaactcagagatctgcttgcctctgcctccttagtgctaggataaaagacgtgccactatggccacttaaattgaatgatttttaatatctgtaaaacattaagtatagatgggctatataacatcagtaattcctttgttcttaatatctttttgaatgcagaaacacatgcatgctttatgcatttatgttatttctctagatgcatttgggagagaatgcaacaagccttagtttgtctgtattttgttcaccccaggtttcagctgtgccacaaagttctggcagtcatgggcccgccatagcagcagttcatagcagccatcatcacccaacagctgtccagcctcatggaggccaggtggtccagagccatgcccacccagcaccaccagttgcaccagtacagggacagcagcagtttcagaggctcaaggtagtattctattttttccttgactcacattatcttcagcaggaaatagtgccttaacttaagagagagggtttgaattacaagaaatgttttgttttttgttttgaaacttgcatgtatttcccttttttatcaccagtgcctgatccagaggaacatacattcaaaaagtgttggctgtatgaatgcctaacactcaagtataccagaatcagagggttgttgcattagaaaaagaagtatcagtttgtgatcctttcttttagactcaagttcttagtataggaagagttttattgagtacacatgtctgggcacagaacagtttccgtataagaagttagtgccataatagagctccaaatttttcttaatgctctgaacagctgggtttgtgggcatctttaatccacgcttagtaaagcaccctttagtgaatgaagtgtcagtgtttgttgtgttcacttgaatccagtgtggtgctttgaaatgcatctacggaggcctgattggagcttgtgttcccaactaaccttttttgtctcataattattttgaaatgtgtaactttggtggcagttgcttagttctccgcttttctggttgacccttaggtaaatctttctgaaatcaagtgcagaaaatgtgagctaaaactgaagatgttttgtcttcctttggttgtactagccaaattttgtctaattgtatgtagtggtttgctttctgggagtgaacagtttaccccaaagtacatatgtgtgtcaaaatgtctactttggtttctctaatacagcagtcatcctctcccttgaaaacttgctttctgctattttagttacccacagttaactggttataaacttgaagtaaaaaatttgcagagtaagctctatgtaaaatttgaatactgtgccatcacaaatagtgttttagtgaactctcacgctgcccatcctcagtggggcggaaaccatccttctactcagtgtgcaccttgcatagcctgcctgttagtcggttagaaagtcaggccagagacaggcccagttccagaacagcgattctcaatgaagagaagccatacagggctttctttaaggtaaaaatgggacggttctcaacttgataagggaggaaaaattataagccgaggtttataaggtagaaagtgagttgtctttattaatttttactgtgcttacttcataagttagactttaccataactatgatgtagaagaaaaggctggtgtagtagggtaggattcaaggttcagccaagtttcaggcatccacgggaaagcttggaacggattctggtctccgagggtctctaagtgtctgctacttagctgctttctcctccatcctggccttattgacgtccattcgtgggaatttaatatttactgaaggacactacgtactatgtaaatagcataatgaacacggcagttgaacaagagggaggagttttatgaaatttacgttatttgtgctctttgggaaattttggtgttctactcaacagttttcacattctacttatggctgtgttgcaaaaggaagcactaccatgagtgtaatgatttactgagtctggggggaaaagactttgatatgatttgtactgcattttgtagatgatgccttaatattctaaagcctaaagcctttatagactggttcttttttttttttttttttttggttttttgagacaggatttctctgtgtagccctggctgtcctggaactcactttgtagaccaggctggccttgaactcagaaatccgcctgccactgcctcccgagtgctgggattaaaggcgtgcgccaccacacccagctatagactggtaagtctcgctgtgtagatgagagtgccttgaacttgaggtcctcttgcctgtttgctgagtgttgggattacaggtgtaaatcccaatgccaggctggttgtgacagccttttccagtcagcccccccaaaggacactgtctgtctctttcacctgccttgctctaggatatgcttgcttgtttctgtgccttacacaaaccagcaaagaagctgggggttaggattatagagtaagttttgtatagagttgggatttttttagttaaaagatcttgattgataggatttctaaatataataatttgctgagttttctttggggaagtgtaggttgggaaggttcctaactgggttgacctgattgcaagtaagaatcatgttgtctcctctctgcttctgcttctcaaatgctggggccactgctgtgtaccagccacccaccaccaatcctgcccctcttttttttttttttttttaatttaaaaaatttcaaaattacatttacttttgtgtgtgtgtgtgtgtgctaaacacacacactaacagcctgtatttccatcttgaaggtttaagaacaactttcagaggccagttccatgtgggtctctgggattgaacttaggttagatttagtggcaagtacctgaacctgctgaaccatctcaacagctcttgaatttgtgtgtctgtctccatatgatttacccacccattctcacattacttagcatttttggtgttttgccttttttccctggcaatactggacaatgaccatagggcctcacacatttgacaagccctctaccaatgagctatagctctaatccttgcctgttatttttgagtcagtgtttgtatttgcatttatgtgttttacttagttaatattctattgttatgaggaaacacagtgacccaggcagtttatggaggaaaggtgtttaattggaggcttgcctttagcttgagagttagtgcatgatcactatggtggggagcatggcggcaggcaggactggagctggagcagtagctgagagctcacatctgttctgctggtgtgtctgggccttgcattgggcttctaagcccacacttattccaacaaggccacacctactgcttcacaaacggtcagttcattggagaccaagccttcaagtatgagcccatgggagtcagtcttgttcaaacaacgagagagacagacgcacacactaaatacaatggagagtgtttcaaagcaggacgtggttgtgatgactttaattccagcacttggaggcagaagctgattgaaacctgtgacttaaaagccaacctagtctacattgctagttccctgccagccagggttatatagtaaagccttgactttagaaaaaaaaatcacaacaacaaaaatacccacctcaaaacattgttcacctatggcagaaggtagaaggctcaaaacatgacagtttcctccaactcttctaccactgtcctcattcgtggtgtctgcttctataggccccatttaatgctatcagagcaggagctgaggagaaagctccgctggtgcactcaattgaatccccagaattcactttttaaaaactgtgtgcagtggtgtgtgtgcttgtaattcctggggagatacatagaccaatccttgaggctcaactagccaacaagcctggcccacttgggaagttcaggtgagagattttatctcaagagaacttatgtgaggactgacctaaggttagtttgatacacatgaatactatcagagaagagaagcaattagcttttgtcatggactctgggtgtagctcagtggtagagtctggtttagtatcttcaaattcctgtcttctactgctagcacagcagggattaaaacccctgattttcagtttggtgctaaggagtatagataggtaagcaacatagtgcttatgataactcaccaccaccaccaccataagagggtatgaacaaggacttagcatagagcatacaggagcccatggattcaattcctggctatacaaaatggaaaccaaaagcacatttagaaagattagacacacaagtgttagaggactgccacactataacataacttaatggtttatttgagcataaacattttatttcatagtatatcaaaaaattgtagcttatgccaaaatcagatatcatttcttaatcctaaaatttaaaattttgtacaatttaaaatactatctcagagtataataaatacttggctatctcctaagtgttctagcatcctaaattatatttgtattatttctggcccttcaaactcattcctgtttgtgtcactttgaatgcttgctttcccttgtctcttacattcagttagtcctcaagtcctgtcacttctccctaaaagcttttgaatctgttgagctttctgttcttttgacctgcattgtcatcaagctgttaaaggcgtgcgcaactcctgcctggctggtttcagtttagcgagtaaactacatgagactgcacccttgctgcttcctgacattcttcatgtttgctaacgtgtacttacccttggctttcagtttataaatcacctcttgggttccctccctttggaggagaacatgtgctgttacggccttcagtgattattttaggattaccactagacatgagtaagtttctgtggagttagggtttcaacttgttactgaatatgtaacgcctgcattggttctgctgcgttgtttcttagcaagtacttaggaggtgggtgagtggatactatggtaatacaatcattagtcaccgattattccctacagaattttgtgaggtaaggctacagattttatgagttgacctttgttttaaaattgcatcatatttttagtgtttgtacagatttctaatacttcataaataattcccttattgtcttttttgagcatggatgatcttctgttaaaagttttgacttatagctctgaaatgtatccctgcccaggtggaagacgccctgtcctatcttgaccaggtgaaactgcagttcggtagtcagcctcaggtctacaatgatttccttgacatcatgaaggaatttaaatctcagaggtaaaggatatgtgtggctgcatttaaatttgtgctcagaacattggtttttaaagggaatatatatacatatatacacacagtcaatctctttatagattattatttctttgggggaatgctgtgttttaggtatgtaactcaagatggccttgaacttttggccatcctatagcctgagcctgaagagttagccttaaagaaatgtacagctacatatcactacattttggtttcatggtaattctagagcactaggtttttttgttttttttttttaaatctatactaaaatccttcttggtgtttgtttcagttagggaactaacactgttaactttttaggattcacgatttggttgtttttatttggtttgtttgtttgttttttgttttgtttttttttaattaatgtaagataacccgatatttgggaatgtctcactgtctgagagtaactcttctgagcagtctagacacaagaccattatgatctgtgctggtatatccaggattgggtccggcttagggacagttttagatgtactactgtctgtatgtctgctagatagacttgttgctgagaatgaatgtgtgactcaaaattgtgacccaagtgtatgaatggctttggaatttgagtgtttctgttttcctgtttagaaaaaacctagtttgaagttattgtattcctctagggcttttgccaagcttgcttttcatagcttttctttcttcctatttgattttgtcagcattgatactccaggagtgattagccgagtgtcccagctatttaaaggccaccctgatctgatcatgggctttaacaccttcttgcctcctggctacaaaattgaggtgcagactaatgacatggtgaacgtgacaacacctggccaagttcatcagattcccacccatggcatccagccccagcctcagccaccacctcagcatccttcccagccttcatcccagtcagctcccactcctgctcagccagctcctcagcccacagctgccaaagtcagcaaggtgagttgtgagaagattctgcatctcctaaccttccccggtgtacacaagttacaacagtgtcctcagggaagacgttgacatatcacatgttcatgtttagatatacttcgttattttgatattcacttaaatcatcacaccagcgaactcgaggactcttgtttgtcctcagcttctgtttatcactagtctcagggctggctttgtagtagtcctttgacacctggaataggatctgtgtgtgtgtgtttgctttgttttttgacttggggttttctgtgttgcccaggctagtttttcaatcctgaactttggtggtcctgagtaactgggaacctaggtgctaccatcatacctagctcagaaatgattatttttatcgtggtcaaattagactttgcataaatggttgtcattatattaaggtggtagtagagctgcttatgatgacatgactgtaaatctcagcactggagctaaaagcaggacaaggaatttgaagatactctgagctatattaaatactgtctcaaaaattgcaatcaagttactccgtttgccagatcacctgataatcacaataagtagacgatatccttgatgtagatatgctaggagagtcgctagccacatagagttaaattttagttcagtgtgttattgcactaactaaatttcacgttctcaagaaccagtgtgtagctgatggcaaaagaaaggatccctttatttcagagcattctatttattgaacatagctggtttagagacactccattggattataggaactattgagttgttgttagctttgacattaaaagcctgtgtagaatgaggttttctttttaatttccacctgttaaggtagtgagcttaaaaattgtgtatgaaaatttaatgttgtgttccagaaatttaagcctgaggtattagtgtcagaatgtgaaactgtctcctaccctgtctttatgatttgaactaactaaaatggcttggcttaactagtacttcatggccctaaatgagtaaaagatgtgacttgggttttaaatttatgttacttttttgatttgaagtttcttccccaatgtcaaaccacttatgttattgaggaaaatacttttttctttttagccttcccaactacaagcacatactccagccagtcagcagactcccccactcccaccatatgcatccccacgttctccaccagtccagcctcacacaccagtgacaatctccttggggacagctccatctttgcaaaacaatcagcctgtggagtttaatcatgccatcaactatgttaataagatcaagaacagattccagggccaaccagacatctacaaagcattcttggagattttgcacacataccaggtaagagggttggttatgtatttattctcccccccaccccaccccacttgttttgttttgttttgaagacagggtttctctgtgtcgccctggctgtcctggaactcactctgtagaccaggctggcctcaaactcagaaatccgcctgcctctgcctcccaagtgctgggattaaagaaaggtatgctccgccactgcctggccatttatccctttttaagcaggccctataatactgggctctagtgatccttttgtctcagcctccccagtagctgggactctggttgctgcccagaaagttttttttttttattttcatggttcaatcgggctttacttacaagatggttaccctcagagaatctagtctgagaacaactagaatatttattatgcccagtaattcttactgggtatagtaactggttagaactagaatgtgtgtttaggagcccacttctacttaccttctttgcttaccctgtaacatcttgtcaggatttttaaggtcactagccatgaagagaatgtttgtttcatattggaagtttctgaggataatttgtaaagcatgatacatttacaagagagcatggaagacattttctaatgtcttctgttttatcagcttaattaaaggaaagtcatgtgtttgtaggttaagatgtgtcattcagcaccttctctttgctcaaaagactgcaatcaaaacagtaattaaaaactttaatgtaactgaaataacatattttagccatatcaaacatttccgaaaataattgttttgtggtttcggattcaaaacagtagtcctcctaatatcatccgcccattttatccttcttcagaaagaacagcggaatgccaaggaagctggaggaaactacactccagctttgactgagcaagaggtgtatgcccaggtggctcgactcttcaaaaaccaggaagatttgttgtctgaatttggacagttcctgccagatgccaacagctcagtggtaaatctcatctagacaaactacattatttaaaattgttaccataagtttgaaagctatagcaagaggggcctttttagatgatattttgatcagaattttaatctgtctcgtatgtcttcattagcttttaagcaaaacaactgctgagaaggttgattctgtgagaaatgaccatggaggcactgtgaagaagccccaactgaataacaagccacagaggcccagtcagaatggctgccagatccgcaggcactctggaacaggagccacacctccagtgaaggtgagcgtaggcaggtagaaggtatggtgctcggaccctgtatgtctagatcaggttggttcacgtcacagaaattgcccacaaagcttcttagcagctttgcaaaaggcaggtcagaaaagcacttgctctgtggattatatatagtgtgtgtttttcagttcctatattttttcttatctcttctttgcttggagcctctagctcttttgtttgttactaagatttaactaatgtttctcattatttgatatgttaaacttgccttggattacaggaagattttttaaaaatatttatttatttattatatgtaagtacactgttgctgtcttcagacactccagaaggtggcgtcagatctcgttacggatggttgtgagccaccatgtggttgctgggatttgaactccggacctttggaagagcagtcgggtgctcttacccactgagccatctcaccagcccctacaggaagattcttaaattgatacttcataagtaaatgagtggtctctggggcagttcaactcctgtgagcatagtgtccataaacaaagttggctagaggtctgtcctccgtctctgaaagctgtgagctgtactagaaggagatcttaagtttgttaggaagcccagcttgctctctttgatttagtgtgtctaagacaagaaggaaactatatatttaatgttgaatttcttgggaattctaaattatgaaatatggagtggaagtaggctacagaatttggttaaatgaaaaaaggcaacgaaaggtagtaggtgtcaagcatgtggcagcaaggactcatgtcacatactctgacagatcccattgtttgggtgtttgcagggttttcttggttttggaatcaggttgaatatagtaatggcttgttgttggctttttgtttaacttcagtaagtattctgaagattgcaagaaccggctaaatagctgagagcttgctttttgatctgtttccatccatactgatgatccacaggtagaaaccgtatgttagtgcttagttccaaagactcaaaggcagcagaagctgtgggtgaggcctgtgtgctctgagatagcagctgcccacagtgcttgtgcagctcctcataagtggttaagaggtgaatttttaaaagtaaattttggctagtagggttatattgtagcctactcatttgtgtttggtttagaagtttttctttgtgtatgttttggagaaaatatctcatcaaatagccttctctgacctgatattcagtaagtagtccaggctaattgccaacttgttacagtcctcttacctcagactactgagtgaagggatacaggtgtgtgccacaatacccagcttgttttcccttttaaaatcaatgttaaattattagtctggccaggtgctgtagtgacacctgcattgtgagcactgtggtggacaggtcagtaaagacgtaacccagtctctgaggtaatggccagccagagctacatagtgtgacagtgtttcaaaaccgcatgacaacagttattagtggatatgctaaaacgatgcttatgctgtctattgaacaatgaagtaattaggctttttttttaatttataatttgaagtagtataaattaaagatatatatctttttctttctatgaggtttgacacacaaaaacttcaattagaaccctttatatttgtctccaaaatggcctattaatattagtatcaaaatataataaagcataaataactttaaaagttctatagtctttttaaattcaattgcattaaaaagtttgaaatccagtctcttaaaaaacctctgaactcaaagtctttctactatggtctcctgtagaatcaaaaatgagcttattaaattctttctttcttcaagagggaagaaccagggcacagtcatagtctgaataagggaaactcaaactcttaactgtgtgtaaataactgtgtccaatgcctgagttccgcttaccattaaccttctggggctgctcctccaaaaggcttcggctagttttctggctctaatggctacaggttgtctcgtaggcttagacaggttgcactccaccattgctgcttgatggtcttcctgctgtattatcctcttcaaaatagttggctattctaatgcagctgggctgccctttcacaaataacctctcctgggctcttctttttcttactccttcaatccttggcttcacttgcttttctggctgcactttcaccaatgccctctcctggcttctccaggtgccaagcctcagctgctctctgatgatttcatgcctttaaagccagtactccctgggggcccaatctggctcctgtagcagaaataaagggttacttcatcctcgcagcatccctttggtggtctcgaggagacacctcccagaagatgtcacctcagtaatgtggtctcttcttaatcaccactaatttctcagctccagctgaccagcataagttgtaaaagtttcactgttgcagtagtagtggtctcttaatcgtggctggctctttagcctcagctcaccagaaccacaaagtcttaattcaaaatagaaaatggttctgatagtctttcaacttatccctgaatttcacaagtcaggctatggttatggtagccaatgccaggagggttttctgaagggagcagagacaggaaaatcatgagcttaaagccagcacaaaaagaggaaagacatccactttaagcattgttcacaggagagaatgaagtttttcattagcattagtagagccattttagcaaacttacttgtttgtgttggtttttctttattaatgccagaaaaaacccaaactgatgagtctaaaagagtcttcaatggcagatgccagcaagcatggtgttggaacggaatcattattttttgataaggtaagtaattggtgacatttgatatttttgttaaagacaaatggcataagtaattgataacatttgatattagttgttaaggacaaatggcaattgttttcttttaaaagtgtcaactgatagggattatctttttgcaggctatttgacttttgtttaatttggagacagactctatataacccaggttgcctttgaactcattttttacttcgcctaggctggtctatagtttctgatcctcctttggcctcttaagtggcactacatgtagcctacgtgtagttgtccgtccacccattgtgtgtgtgtgtgtgtctttttcttaatttttcttttttaaagaagtatttgttttgtgtgtatgggtacactgtagctatctccagacacaaccagaagagagcatcagatcccattacagatagttgtgagccaccatgtggttgctgggaattgaactcaggacctctagaagagcagtcaatgctcataactgctgagccatctctcaagccctgtctgtttctgttttctttctccttttattctctaaaggttagaatctcactatacagccttaactggcctgggacttcctgtgtatatctgcctgcttttgcctccatagtaccaggagttcaggtgtgtccccctgtgctgtctgtcttttactagtagtgctagtcgtgaagcccagtgctttagacatgctaggtgtgtttccgctgtggagctttgattcgacatttggttttgagatagggtcttataactgcccagatttgcctcaactttgccctgaagccaggaatgacttttagctactatagatttcactccttcctcctcccagtaggctgtagatatgcactgtatgcccagcttgagaattctattggaatgttttcaaagatcggtaaggtgtttttatgcagtagctagaggtgaatttttgataagacaccatgaatgctacttcagtttgacttctgtatctgattttgtccttggcgtcaagttgatgattagcaagcaggttccacagtgaggtaggcagctggtgggcttctcacaggacacaagtctgaattggtgtagtcattgttacactatcttgtacctctgggtatttgcagaaaacaaattatttaatagccttttctgtctctgtgactttaagagctatcctgatgaaggataatggtaatattacatacacatataactaaaagagtgtatgtaatatctcaaagtcttttttaaattcagtaaaagaaatggttatggatgatacagaatttgtatgtgtttatcattttggttgagtgatttgattaggctattaggctattatagctattgttggctatctctctactttttcataggcttaaaagctgataaattaaaaaccaataactggcatacagtacaaaaaatgtagtctgtcaaggattgtccatctgtgattcccagtgtgttctgtgtggtgcctcctgcaccacaggaggacataatctgtactaacaaacaggtgtgttgataagtcctgggcagaagatgcacagtgctaataattgtcttttagatctaaaactccagattcatagacctcgttatgtagttgtacattttctgtaaactgttatacattctacaactttgagtctttaagaaatgttttcaatgctgtgagtagaataatagcctatgtgcatgtgtgtgagagaaaacaatggtgtgtgcacatgaaaggcagggtttcttcgttgagcaccactgaccgctccagacagctggccctggcgcttccaggaaatctcatgtttatgcctcctatcttactgtaggtgtgctgacagttcagatcaaaccctcctgctgcttctggctttgtgatttctggaaatccctcctctgacctcaaacttgcttggcatgtgcttcattcattgaaccatcttttagtcccttgtttgtttggggtgtgtgcattagtgtgtgcattagtgtgtgggtgtacttgtacctacctgttcctgtatgtcagtgtgtatgtatgtgtggaggccaaaggtcaggtgggtgttgtctcttctaccttattttttgagataagaactcactgaacctagacctcactggttgcctagtgtcttagggtattattgctatgaagagacactgtgactaaggcaactcttagaaaggcaaacatttagtagttggggctggcttacagtttcagaggttcagtctgttatcattgtgggaaggatggcagcatccaggcaaacatggtgttgaaggagccaagagttctattctacatcttgatccaaaggcagccaataggagactactgtatgacacttggcagtgcttgagcataaatattacctcaaggtcccccaaaactaaagtgaatagtaacgcagcctgtgtgcgtgtggacactgtgcctcatgtgcacacttgcttcccatgcattctgtctgttttagattgtttagagagaggttacagcatcctattgtctccttttaaggtgatttctttgatcatatctaaacaaaatgacatcaattccttagtaaatatctgatcaaatttaccctgcttctctttataaccatttttcttctggttgtttctacaaggttcgaaaggctcttcggagtgcagaggcctatgaaaacttccttcgttgccttgttatctttaatcaggaggtgatctctcgggccgagcttgtacagctagtctctccttttctggggtaagtgaagtgaagagcgtgccccctagtactgtccatatgccaatgtagcagtcgttaagagtgtgtgattgataaaggtgttatcacaagtttcagcgtcagaagggcctttttaagccttgtattgtaacttttaggatgggaagacagctgggtgtggtgactgcactttaatcccagcactagggaggcagaggcaggtgagtttcaaaccgcctgcactacataccctagctccaaaaaggaaaaaaaaggtgctggcacagtatcagctatgatgcagtacttaatggtctcttgatcatctgacctgcactagattatagatcagggctcttaattgcatttgacatcctgagaattatgtgaacagtaaagcaatgttcttgatcaaagaatgtctttttactgtcttgttggagagcattctgtaaggaaaatggacctaattgattaacgatgcttctcaagttggaaataattgtctttggaatttgtctttggtattggagttgtgatccaaccataagttgtaatgttgtttctcacgataactgtgtcccacctggaattgcttaccagcttttggtttggttcttcaggaaattccctgaattgtttaattggtttaaaaactttttgggctataaggagtctgtacatctggaaagctttccaaaggaacgagctacagaaggcattgccatggagatagactatgcctcttgtaaacgactgggctctagctaccgagccctaccgaaaagttaccagcagcccaagtgcacgggacggactcctctgtgtaaagaggtaagtgccggtcttgggtcttcagtttcttctaatgagggtagtggtagtaccagtatcagagtcttcaaagtctgcttgtcagggtaggtaccttttcctctgctactatatggggccccagggtcaatttcagttggctaggtacaatggcaagtgcccctatttatgtggtaaacgctctttcaggaaaggccaggatttatatgaattgtgaaatcatgaaccttttctctttttttaccaaaagaaaacttgtattcagaactttcactgtcatagtgtttctgttgctgtgatgaaaacactatgaacaaagcaacttggggagaaaactatttgccttaaacttcatcactactcatcactaaaggacgtcagtgcaggaactccaatagggcaagaacctggaggcggggtctgaagcagaggcagtggagaagtgctgcttactgacttgcttctcatggcttgttcatcctcctctcttatagaacccaggacaccagtccatggacagcccccccccccttatcgtttactaattaagaaagtgctctatagttggatcttctgtattgtcagttgaggttccttccttttagataactctagcttgtaatcaagttgatataaaactagccaggacatttaccaaatttaaagtttgggctaatgctagttgatttttcccctcttcatttttttattgagaaagtttaatcaccaataagtttttacaggcctttctgcctcttttttttaacctaaaggttttaaatgatacctgggtttccttcccatcttggtctgaagactccacttttgttagttccaagaagactcagtatgaagaacatatttaccgttgtgaagatgaacgatttgaggtatcttttgtcatttgatgtttgggaacaaggaagataaagaaagaaagggatatttagatactgtgtgtgagttagctttaaaaaaaaataatgtaagaggagacagctgatcctggtagtgcattgcaggaaaacttaaactgtaaaggtcgtagctgggatgggaagatgtagaatgggagtcagtgggacaagtctcctgttggtcaaagggactactgaaactaggcacagagtctgcattgcccagatgatggttactaagaccacaccagaagggaaagaattgtagtctgcatgtatctgacttagtatagtgatcacactgagttgactagttctgttccttcagatcgatgggagaggtctcttaccagattaacactgccagcattccttcttgaaaacatcatatattgttccccaccggctggcagttaccatcttcccccatcctagttacgtgtttatcactgataagacaccatgactaagacaagttatacaagagtttaacttggcttaccgtttcagagggtgagagtccatgatggtggaaggaaggaacagctgatagttcacattttgatccataatcaggaggcagagtgaggcattgagaatcactagtctttgaaaaccaccctagtgatgcatctcctccaacaaaaccacacctccttatccttcccagacagtctcaccagctagggactaagtattcaaacatggtgcctggggcttttcttatccaaaccaccacatacgtagagttaattatagaaaactacagatagatttatgaaagtgtagtttctctgtgtagctttggcttcctggaacttcgttgaccagactaaccctggactcagagatccacctgcctctgcctcctaaatgctggcattaaagatgtgcaccaccacttcacctggcttctatgggaagttttcaatcaagctggagaacatatttttagctaagggcagtttagagtacctataatcccttgagagagaaggcagaaggatctaagaattcatggccatccttatttgcataaacagttggatggctgcattggatgtgaagcagtaatacagtaccccaaacccttttactctcataactgtcttttaggattgtttccttactatttgtaacaggtttatacaatttcagaaaagttcataagcaagatatgaacacattttgtagtcccagcctttaggtggcagagggaacaacttgccacaaattgaagggtagtgtggtctacatagcaagcccttgtctcagaacgaactaaggtgcaaggaaaggcagtgctgtgatagctctctctgctcccactggcctctggtcagcagtgctaaacagtgtgcaatgggttgcagttagcattggtaactgctagtcagtttatgtatcagtattaaactttatgaattatgtacatggcattttttttgccagaaaataaccttatgatagttgtaggtgtccttgttcatattttactggtaagagatccttacataccttgtatggaaatcacaactcaaattgggaggagtttgacaccctccttattctcccagctctgctgtgttctggtgctaggcctgagaccctctttgttcttttgttttaagcttgatgtggttcttgagaccaatcttgcaacaatccgggttttagaagcaatacagaaaaaactttctcgcttgtctgctgaggaacaagccaaatttcgcttggataacacccttggaggcacgtccgaagtcatccatcgaaaagcactccagaggatatatgctgacaaagcagctgatatcatcgatggcctgaggaagaacccctccattgctgttccgattgtccttaaaaggtatgtatcttctggcttttgtgtgctgtgtgacaggttcagtgtcccattaaatagggctctagttttctacctgagtatctaattggaatttcagttctttcctcagtagctcaacactagggatagagtagaatggcagaacatacgttaggggttttgtggaacaaatggaacagatgttgacaggtgagggtgaaagacttgaggtgcagctcggtggtcgagtgcttgcctatcatgcatgagtcctgagttcacacagagaaagcctgatgagtgtatggtagagtgtagtgcgttcacatttcagggttgggctttgtttctgttggtagaagggaacttaggactgtttgtatactatgcttgatagggaaatactttaccctaccccagaccgcaggcgtttgagggactgtgatgtgtgtatgtgtcggggtgtgtatggtgtgtgtatgtgatggctcagaatgagttcaaacctgcaatcttcctccctcaccacatgccctctctaggaaacttgcgtttccatgagcacagtaaagattctgagtcataacaaagaagcaagttgctttagttagttgggagaactagttttttgagaatactccccaaaaccagatgtggttcatgcctatagtcctcacattagggaggcagactcaggaagattgctgtaagtttgatagtagcttggtctacatcatgaattttaagtcatccaaattttcaaataaggtcttgtctcaaaaatggtttcatgctccctcttaaaaaccccattggtgataccactcactttgtgaatattcatggcagccaaatttgacttctttgcctataatgtcaggattggggaagtagaaggcagattgccatagatttttagattagtgtggtctatatacattttccagtaagacttgtatcacaaaaataagctcccttaagaaaaaaacctcacttggataacaccaaggacattttttgaagcaccaacagcataggtctgagttttcatcaagtgtagtaagcccgcgacacactcccgcatttaaccctctcgattcccacatgctgtacttgtatcccttctcacctgctaggttgaagatgaaagaagaagagtggcgagaagctcagagaggcttcaacaaggtctggcgagagcaaaatgagaagtactacttgaagtctctggatcaccaaggcatcaacttcaagcagaacgacactaaggtcttgaggtctaagagcttactcaatgagatcgagagcatctatgacgaggtgagctggctgaccgtacagctccctcagctctgcttttttgtgttcagccttgctttgacttctacagttaactaagaactgccagttcttgtatcatggtctaccgtcttaaacctactactcaccgattcactcagttcttcctctggtttcccagtttaccattctgcctttaatgtacactcttcttttttttttttttttccattttttattaggtatttagctcatttacatttccaatgctataccaaaaagtcccccatatccacccacccccactcccctgcccacccactccccctttttggctctggtgttcccctgtactggggcatataaagtttgcaagtccaatgggcctctctttccagtgatggccgactaggccatcttttgatatatatgcagctagagtcaagagctccggggtactggttagttcataatgttgatccacctatagggttgcagatccctttagctccttggctactttctctagctcctccattgggagcccaatgtacactcttctaacaagacctggcatctcctctacctcacttaaaaagtggtagtaaccctgttactctgctcacttagcaggggtatggatggcacttggagcaaagactcagagataaatgtgaaattggtcttgctttttgtgacctgccttaggaggtaggaagcataagtgacatctatcaggctttcaaaagctggccctgagttttaaagaataaaaatagtaagtgaactttaacaaacacttaattgtttatctttgataatttgttaacctttacatgagaaattctttttttttttttaatactttttattaggtattttcctcatttacatttccaatgctatcccaaaagtcccccataccctccctcccactcccactttttggccctggcgttcccctgtactggggcatataaagtttgcaagtccaatgggcctctctttccagtgatggccgactaggccatcttttgatacatatgcagctatagtcaagagctccggggtactggttagttcataatgttgttccgcctatagggttgcagatccctttagctccttgggtactttctctagcttacatgagaaattctaccccagtattttaagtgctaaatctggaattttaaaggtaattctcttaagtcttcaatatatagaaggcactaatctttttatatcaagccaatttgtccatagtacttatgaatatttggaagagagacaaacattattaaggttaactcttgtatttcagattaagtagccactgtcatgtctctgtctaagcccaaactggcctagaatcttgtacccttcctggcttattctcccaaaggatgtaactacagataggtgccacagtgcctaaagtgcattttggttaataataaaaatgtgctgctaatgtactctttgtttgttttgagacagggtatttctatgtatcccttcctgtcatggaacttgctctgtagaccaggttggccttgaactcatggatctgctggcctctgcctcctgggtactaagtttaaaggcatttcccaccactgctcagcatttctggtatagtattgtaggtttgttgttgctgtatacatgtcacacaatgcttttatgtctgttccatcagaggcaagagcaggctacagaagagaacgctggtgtacctgttggcccgcacctctctcttgcctatgaagacaaacagatactagaagatgctgctgctctgattatccaccatgtgaagaggcaaacaggcattcagaaagaggacaaatacaaaatcaagcaaatcatgcaccatttcattcctgacctgctgtttgctcagagaggcgatctctcagatgtggaagaagaggaggaggaagaaatggatgtggatgaagcaacaggagcacctaagaagcacaatggtgttgggggcagcccccctaagtccaagttgctatttagtaacacagcagctcaaaagttaagagggatggatgaagtatataaccttttctatgtcaataacaattggtatatctttatgcgactgcatcaaattctctgcttgaggctgctacggatttgttcccaagctgaacggcaaattgaagaagaaaaccgagagagagaatgggaacgggaggtgctaggcataaagcgagacaagagtgatagtcctgccatacaactacgtctcaaggaacctagtgagtgcttagactgtcagctttatgcatggggtagatggctggcttcaaggccaccttaccttgaagtacacttagtccttagattggaactagggttcgtatcctacctctgcaacttagctggttgtgtaaccttccttgaacccatgaatgaaacccccccccccaaaaaaaaaatggaggcagtatttgtcactttctgtggttgcttgagggcttaagaaagatgcaagcatggaaccttgtacagtatccggttcatggtcatgtgaggtgtttagtttgcactgtggacacatgagggacgtgggatccattggctaggttagtgagcagtggttcagatgagaaagaaacgtcacagttctttctattcataacatagaaattccttgttatgcttatggcacataaggaatcttttcagatgtgtgttagcatctccttaatgggcttcttggttcattcctgatatttctgaagaggaattggcactcaagatggtttgagacaaggcaaagggatagacaggattcaagggaaaggaagcccagaggctcatttaagaagctagctatcattggctgtatgctgggttctgccgcctccttccacataatgctttcattctgaagttgggtgcttaacctgtgagccagacacatcctcacaggcttcccttctttgctcttcacgaaatagtaaataactgctgtaggagtcctgtgtataaacctagtttcttatctgttgaactaatagcaccaggaatctgtttgaaaagcctttatctgttttagtcctagcttggaagaaacaagtagaatttacaaatataaatctgggcttgatcactgtcttatcctggacttatgctgaagcagcttattcttgagtgatagtgccaacttcatgccagtcatagtttgtggctataaatctgtggtttggactcttatcctagtatattttaaaggctagctccctgcttcctgggcttagacaaagtgatgtagtgtgacacaactcaaaccagtaacttgttttaagcagtgattgttcgtttttgcctgtaagatccaccccatttgtcccctttctaatttctccttactaatggatggccagtaatcagtaagtgtactttttgtagttaacatttttgatcaaatttttattgatgtgcaacctgtatgcaaaaaggaacacaaatgagaatctgcatttgtgtggggtgcatgtgccttatgtgcaaggaggctagaaaaggctatggctactgtgttatgtaccttccttctcgagacagcgtctcactgagccccctagagatcctcctctctgctgaccttcacagtgctaaggtgacaggtggtgacagccaggctttcacatgagtgctggggcaggggctcttatccactgaaccgtatctcctgccccacaaatagaattttatggctctaaatttttctataatgagcatactttagtcaaaaaaagaggtcaagaaaataaagccaagccccagtaacttctttgttctactattttggttttcagacttagaaatgagttttttttgtatttgagagtgggtctactgctataaaatgctcactgtcccagaacttgttttgtggcctaggctggcccagcaatccccttgcccctgggattatgtacatacatacatacgtacatatatatgtacatacatacatacatgagctcctggtgcccttcttagttactatgtccttttactagtaagattcactccagctactggttaaatgtttcatgtgcaacaaatacaattcatctaatgtaattactggagttcagtgttgcaaatctattttaagcaaagggactgtgatacaatcagagttattcattttcatagaggggttaatttgaataacttctgtagccaagagttccaagtgtggtagcatctacctatgcctgtcttctcttgtccatactttattcttcattgaggtacactcatgagcaactgtcccctttgtgaaatggttttgtgtaagtgaaggagccagcaacttgaaggactctcttgggatattttgctctcaggtgacagaactcagcagtgctcaaagtgtctttttagcagtcagtctgtgctggaagcgactgttagaagttgcagagtcactgttggttcttcgatggacagttctggtgattatagctgcctactagatgtcatctctgtagtgggttaagttggacatgtttttgcatatctggtattttgtcctttcagatggtatataggccagctgtgggattctgtattctctgtcctcgagcttgtcttagcagagtacagtcttacctgtctaatctttcctgtagtggatgttgatgtagaagattattacccagctttcctggacatggtgcggagcctgcttgatggcaacatagactcatcacagtatgaagattcattgagagagatgttcaccattcatgcctacattgcctttactatggacaaattaatccagagcatcgtcagacaggtgagagggtgtgttggaggttagcgctaccaagggaaggtgttctcagctaaaagtcacaaaggaaaagcaagatttctatgggaaaaggaaaagcagcttaaccatatatatagcagtgtttataaacatatgtctttgaagtggaaaggaccaagttaacatgaagtcttgtgtggcttctccttcagagacaataacaaacatccctttgatacactgacagcaaaccaaagaaatgattctagttaagtcttagtgagccattatgtgtgttggggtcacttaaggaacatgagcaacccaaaggcagtgcagtgaaaagcccactgtacacaaaacctgagtctttgaagctcctgcacagccagagggcagcttgacctatgggagagagtactttccccagaaattgtttctccttttagaagaggatcagaaattcaagttcatccttggtggggatgggtgtggagatggtttctaatttaaatttcaggggatttctgaattttctatttcctttatttcctgaaccttgtacattttgtttactttatgagtctggtgttactgctcagagaggatagctcaataagtctctctccagctcacagaactggactcttccagccctggaattggttcttaggttctcaatgtgcccctcctcagagcctgtcctaacagccatttgtctagaacacagtcctacctctttatttatccaagaagaaagcataggtgtagcttagccttttccatagatgacagtgattctgtttatttgcctcatttagtattaaaagtcctgtacagtgctctgcccacctcattatctgagactcagtgttagatttgtggttgcttttatgttttgttcctggaaattttaaatatgtggagttgtttgtaacaggatctcactatgttgtactgtctgactgagaactaatcctgtgtacttcctgagtactgagattataggtgtgaactacaacgcccagccaatgtgatactttctaactgtcatccttctgacagggagcatccttgtctcggggtttctgtggcggcattgttggcctccctactgaggagtaggaaaagccagtaaaataaatgtttcataaaccctatgttatttttaaatagataattcatttagttagaagaatctggttataaatttatgttaacgctgtcaacatatttttaagaactggaaatgggagttgcctccagaacccacaaccatgagtttttaagacatgtttaagcttttcatttgaactcttcagtgagttttgtctgattatgttttctttttatttggtggtccctttggttgaacaaatatcaaggtcaggccatatattcgtcttaattttctcaggctggggctttatttagctcaattggtagagttaattgccaagcatgacaaagccctgggttggattttctgtaccccataaaatgggtgtggcactactcacctcagcgtttggaggaagaagccagaggaacaaaatgtgaaggccatccgcggctacatagggagttcaagggcagttccccatacataagatctctccaaaccaagaattctaagtaggcaggctcagtcatcttagctacagaaccatgatacaatgtcatcctgtgaagccttgactaggaacgcttcccttcgtcccaggcttctccactctagtgcttctctgcacgtggacactcagcatatcagcatacacttccggcctctccatccctcgagacttgagcacctctgggcttggtattacctagctttcccatgcggtgcttctctttaacagcaacaacaaaaatcttggaaaaatcatccctacatcatttctggttacctgatgaaatacttaatgtatggctgtacataccccatcgttgtctctggatttgtaatgcttccatttctaaagattctgagagaggcagatacctaaaagaggatgtgaatagagggtcagtggtacatagtcacacggagagaactcatgtcttggctagactgacttttctcactcttctcccccacttaaaactctgtgacgctttcactgtctttatcaagtcataacattccttacttcaatggtattgtccaagtcttttatacttcacaaagactgtatcttcctaaaaaatagaatggcgtagtaaccatgataacatgagattaactaagtaaaattgatgagtcagtattgaaatttacatttttgcttctctgctttttagggaccagttggtttggtgttaggcactgaatgtaagactttgtgcttgctaggcaagcctcatttcctgactttaaaggttttcttgttttgctgtatgtgtatgtggaaatcggagaataacttacgagagtgggctctcctgccactgcgtgaatttcagggctaaactgaagttgacagttttaccctctgcgccatttcttaggggacttttaatttcacaataagaatagtagagtgggaatggatgttacccactgtggcatttgttgtggcctgagctggtcccagcagcctttgtagagttaatataaggcactgagtctctgctaagccttgtctcctcccctcaacaacaaaacaggttcacagtttccaacacgtttaccttctatgaaaaatgagcagttaggccaaggatataactttacatagtcctgggtttcatataactcagtcttggaaaaaaaatagagttaacatgtacaatttgagggttattctgtgtgaatgcactaattagtggcctgctagtgaggacgctaccttggtgcaggagcttgaccttgaggcttggtctgctctttagttgaattcatgggggcaggtgacgctgcaccagttgcttttttgtttttgagacagggtctatacataggcctgggtgtcctggaactcactatgtagaccagaccagtattgagctcagtgattgcctgcctatgctgggattaaagtgtgggccatcatacctggtgtctgctgcaacttttaagtttaggaatcctagattgagcctagcaagtagctcagcagctaaaagcacttgtagttcttgtcagcacccacgtggacgtccatgtcctcctgtaactccagttccagggaaaccagtgttttcttccagcctctgtctatgggcaccaggcataatatagctgacacaccacaagcttacacacaaagcacataaagaaaaataacaaatatttatttaaaaataaaatcagatgaatcttgttttcagaattctttgagatacctgtcttaactccaagtctcaaaagttttaatgtcttaacacaaaaaaatttctcacaatgggacatccctccattccaacatggttcacagggtaattgtagattggataagaaatacatgtgaaacaagattgtaaacagtttaaaagtacatggagaggggacacacaccatggagcctggtaaggtggtgcatacctgtagtcccagtatttgggaggtgatagtacttagcttcttaaattaaaaaaaaaaaaaaaaaaaaaaacatgtttgtaagctgcctgcggacaggagaatcggccctggctcactggccggcctgtgctttgttccagctacagcacatcgtcagcgacgaggtctgtgtgcaggttactgatctttacttggcagaaaacaataacggagccacgggaggccagctcaacagtcagacttcaaggagccttctggagtcagcataccagcggaaggcagagcagcttatgtcagacgagaactgcttcaaggtaagagccgctcatcgaaccgtggaccccagtgctgctggctagactggtacaggctggactggggtgtgagccatgtaacctgagcaaccatttactagcaaactcgtactagcaaatgtttactgattttttttttttttttttttttttttggttaggattgatttttatgatttttatgctttctcttcatgtgtttgtccatcacctgaatggaatgtccccagaggccagaggcctctgtcctgtcctggaattgagttagaccatgtggttctgggagtcaaatccaggtcctcaagtagagcacccagcactccgccatctctgcagtcccatttctaccttaccatcaccagcttttcagtacctttcatatctcttcctttggaacaaattgtataatttacctttctacttacactgtgacaatctaggtttatagccttgaaattttagggtttgtttgtttgtttgtttgttttgtttacactttgcttcttttttgcagctaatgttcattcaaagtcaaggtcaagttcagctgactgttgagctcctggacacagaagaggagaactcagatgaccccgtggaagcagaggtgtggacagtatgtttcagagcttgtctgctcaccctgaattctgatgggctgtagctccttaggatgtttgtgattttgtttttagggtttatttgtgtgtgtgtgtgcattgtgggtgtgttcaaaggactaaagtcctctaaagagcagccagtgctcttaactactgagccatttctccagcccctccataggttttaagtgtcaggatgtttagagcgcaggctatatcactccctttggaggctctagtggtagtagccatttagagtcaatgcccccttttcatccttaataatgtgggtaacagctttgctggccttttctttttgtttttcttcctaaatagcagtaaacatggttcttttgttttgtggtatcatttgatacagcctcatgtttactttttagtaatagccaggctacatagatgatagaataagacagtttggcttacatttccaaaaactttgcttcaaaagctgccagaattctacatattaatgtgggagattttccgtgacactattttaccatttcttcagattatttttgataaccatcttaaatgtactatcttgctggctaacacattttaacatatgtatttcaataacaacatacatatctttcaggtaaggggcattactttttagttttacactgttggcgttaaaatagacaagcactttaccactgagctatgacccgagaacctcccctccttatttatttatttatttatttatttatttatttatttattgattgattggataggcttagtctcacaggtgagagaattgtttttgtatgctaccacagtgactatttattcttgaagtctgttttctttggacattttggtaacagattagactcgtgttatataggtatagatagctgttttcatgatcgtgtgtttctattcctagcgttggtcagactacgtggagcgatatatgagttctgatactacttctcctgaacttcgagaacatctggcacagaaaccagtatttctcccaaggtgagtctgcaaagtcagctctattggcaatatgtgctgcacacagccaggagtgtgcagtttcagggtctcggtttcctatattgttcatctgttctgtctgctgagggtcgtgttagagtgtttgctggcttacctgtaaaatctacagcattcaagaggtgagagcattagagaacctgtagttctccatcagcttgctgtgttagtatgctcatggctcagtgattcacttgcaggacgaagcattacagcaacactcagagaactacagttaccacaagaaaatacagagcaaaatcagcaagggaacaatgtgaaggagataggcacaagcatccaagagcccattcttaactcctctaaacgagtgttgtgtttggcaacacttccagcacttggaaaacagagacaggtggatctctgtgagttagatgccagactggtctacaaagcaagttacatgataggggtatatggagagatcccaatgggggggtggagtgagggaggagacctcacagacagacccttctttgcttgtacaaaattccagacagaagattaaatattctagtttcagtgaaccgcttttgttgtttgggggatgggagaaaggacccccacatctcttctagcagctttgtagttcttttctgtatagaatttttaaaaatttaccagtatctagacaaatacaatattaacattctgatttttgaagtagaaactggatagatgagccatgtatatgtttatacctgtgatcctggtactggagagattgtggcacaaggattgctaggagttcaagacaagcctaggctatactatacaactcgtctgttttagtcagggttctctaaaggaacagagcttagaaaatgctctctatgtatatagaaaaggtatttattataatgtcatacaggctctggtcctgctaatataacagtggctgccaatgaataggaaggtccaagaatccagcatttgtttggtccacaagtaggttctaatgctagtgaagaaatggatttgctagccagggcagagcaagtaggcaaatggcaaaagcttttataggcgtctagcagaaggtgtggcccagatctttgttggatcttcccagctcaaaagatctggattaaacatgtgtctccctgcctgaaagatcaggatgagaagtagatctactttaaattaagcaaaaatccctcagagatgtgccctccattttgggggagtttagttaattccagatgttgccaagttgacaaccacatcacacccactaataaaaggattgggtatgaatttttcctttaaactttgagattaaaatctctatcatagattcctaagacctatattcaagtgttactgggtttagtcccaaggagagcatggaaagagcaggcacctgaagaaaaggtcttcccaggttccacacacagtgatccacttaacagacctgtagcagttgccacgccccttgaagtaagatggccatggactctcttatcttatcatgccacaatttgagatttgtttcgttgggtggcttttgatgtttcacacagggtctcattatataatcctgtcaggcttggaactccgagcctttgccttcgagaatttggattaaagctttgcaccacagtttcaaacactttacaatcgaaattattttccagagctagaaagatggctcagtgggtgaaagcaattcttttggaggctggaagatagctcagtggttaaagagcactgattgctcttccagaggacctgggctcaattcccagcacccacctggcagctcacaactgtccttaacttcagttctaggggctttgacacctcacacagatagacaagaatgcaaaaataccagtgcacataaaataaaaggagataatttttttcaaaaaggcacttcttcttgcagactatctggggttcaattaccagttctcacagcatagtccacaaccatctagttccagggaatgtggtggccccttctgaccacaggcaccaagtatttacatggtgcgtgcatgtatgcttgcatacagacatacatacatgggatcaaaatgctcagacatagaaagtaaatcttttataaaagcccattttcctttattctggttagtacatggcaacagtagaaattaatttttacttaattgaagttctaacagtttagggcaaaaacctatttttcatttgcaagtataggactgtataacaataactcaacaaacttgaagtcatctaattgaaaagtgaaaatgggcatgtataacaataatttcacagattttttacttctcattatatttatgtgtataggggtattggcacatgagtagggtgctcacagaggacagctctgtgggatcccctagagctggagttacaggaggctgtgagccacctgcctgggaactgaactgggctcctttacaacagcaataagtgctccagccctgtaacagaattttatttttgttgttgttgttactccccccccccccctccctgagacagggtttctctgtgtagccctggctgttctggaactctctctgtagaccagactggccaatccgcctacctctgcctcccaagtgctgggattaaaggcgtgggccactactgcctggcattacagaggcaaaaagatcctgagttgcagccttgagaccttatctcaggattttttttttttttttttttttttaagaaaaaaattacggggctggtgagttggctcagtgggtaagagcacctgactgctcttccgaaggtccggagttcaaatcccagcaaccacatggtagttcacaaccatccataacgagatctgactccctcttctggagtgtctgaagaaagctacagtgcacttacatataatcaataaataaatcttttacaaacaaaacaaaacaaaaccctcaggctaaagggatggttcagtggtcggtcaagagcagtgactgctcttcttggggtcctgaattcaattcccagtaaccacatggtggctcacaaccgtctgtaatgggatccgatggcctcttctggtgtgtctgaagacagtgacagtgtacttagatatataaaataaatcttttttttaaacttattagtattaaaatggcaaatatgaccagttaacaaagggtcatactttgactttcatgtaacttcttgactttttgtcccaaatgcgcacaacatgcttgtttttcatttaactgtatctactggtttatatttctatctgaaatatttgaattgaacatgatagttcatttttctcatgaggtttagagctcaccaaacaaatctcagatttaggcaatcattagagaacaatgtcctattaattatgaacttctagaaaggacttggtaacttttctaagtatacagtagaggccaaactacaaaacaacaacaacaacaaaaaaaaaaaaacaaattattttttttctaatttaaaatacaaatcaaaaaaaaaggaaaaagagaaaaaatacaaagcaaatattgatgagtttaataatacacttttacaaagaaaggcagagtaagcatgacttttggttttttgagacagcgcttaactatagccctggtcgtcctggaacttattggtagaccaggcttgtccctaactcagcgagatctacctgcctctgccttcagatgtcaggattaaaggtgtgtgccacctcatccagaaaagcatgacttgttaaaggccagattttggttttcagtgatttgtctgtcagctagagagggagggagggagggaggcagggaggcagggaggcagggaaggaaggaagtacaggtatgcatgtgccatagagcaaagggggaagtcagaagacaactaacctgtagagatggttctctgcttctgctctttgagtcccacaacttagactctgtttgatgatgggcctgtcagcaactctagtcagctaagccatctcatctgccccaattcacattcctttaggtcttgatgcattggtaggccttgagttcccaaaataatctttttactcattgtgatcatgctagttacatttgccatattgcagattcaaaaccaaaaaccatggagttgtggctctatcagtggaatgtacaaagctctgtgtttgacccctaggctctataaagcaggtgtggtggtgtatggcagtaattccagtactcatgcaggaagttgggaagtaaatgttatccttaagaggccagactctgtctcaaaacaaaaaacacccagatactaagcctagcatgttttcatatatcttactgaaaagctattttttaaaattttgtttgtttgcatttctttttaatataaatgaaaaaattgtagcctcacttgggtatacagccgtagagagtattttcagattgtaggttctattcttcaacacagtaagtattccataagtgggtgggccagatggtagaaaatgctaattgtgcgtgcctgatagccctcagttccatacccagaaaagtctctggtggaagcagagtgccaattccctctgactcgacacatacatgcacatacacatgctattaaatttttaaatacaagactttacaattggtaatatacagtgtctacaacctttgtataccattagcaaatacaccacttagaaatataaaataaaaataaccaaaaattttttctaaaagattttataaacaatgtaactacttcagcatgtccattagttaaaaacagctttgtttggtgtccatctgtggtcagaacaaaaagtttctaagtatggtctgtagtccccagaaatagtagcatctatcccactcacccccagtgttgggaagggcatattgtggctcatggtttaagacaggatagagtcagtcttggtggggagcgtgagttccaggacagtcagggctacacagagaaaccctgtctccaaaaaacaaaacaaaacagtcttggtggggaaggcatgaggacaggaggcgaagcttctccgtccctcgtaaggacaggctatctatactgtcagggctggcctccagctcttaatcctgagcttcctgagggctgagattacaaggtagctgtgctgtgcctcgttgtttcaccattactcttggactgccaatccaaatgttttgggaaaggggcaaacaatattttactacgaggaaaatagttttgatctcatactgctcctagtaagatcttagaagtttcagacctaagtcctcagacctaagaattgctgtcctacaggggccagtacacatagctactcgggcaatggcttttattatcagtatcattaatgtttgaagatggagtctttcaatgtagcctaggctaatctcttattttacagtccccctgcctctgcttcctgagtactggaatttcaggccttgagtcactacactaagcttggcgggtttagtagcaaagtataagatataatgtaattggctatctgataatttccagtggagattggagagaccgatgtgaacgaacttacatccttaagatacaaataggacatctctgggaaagacataaagtagaccaagtaatttttttgttaacctagtttagatgaggaactccaatttagaggcagtgaaagaataaattggaatactttgctctgtagctgttaaagagaacaagacaaatttgtgaactgaagtgcttaaaaaggttgagaatagcatcacaatcaaggttgaagcttcaagttatcatatatgtaaattcagtgaaaccattgcacatttgtatatacatatagctaaaattgtaagtattcttgaggcacataaggaaagcacatttggtaggagccgtgggatctgtatatagatggtctatcaacttaaagggatttctgctttgtaggaatttgcggcgtatccggaagtgtcaacgtggtcgagagcaacaggaaaaagaagggaaagaaggaaacagcaagaagaccatggaaaatgtagagagcctggataagctggagtgtaggttcaagctgaactcctataagatggtatatgtgatcaaatcggaggactacatgtaccggagaactgctctactcagagctcatcaggtgagaaatggtgactgaaatttctctgcatttcccccagttctacagaactggtattttttttctctctctgtaaatccctgtttctgggaacaagtatttgttgtgtaaggaaatgtattcatttgctaaggaccttataacagtaccaccaacttcctgcttttaagaatggaaattgttgggatctatagttcagtggtagaacacttcccagcatacctaaggtcatcttggcatggttcccaaatacctgctccccacactctatatatcatcttgaggttctgagacctagagccccaagatttatataccaacaactgttgtgttttgaagcctctgaggggagaatggtcattggtactgtgctgttttaagtgttcctgggtcaatcatggtctttctcttttatgtctaaaccagtgtcacactttgaaggatgagtgtgtgggtgaaaatatcaatgtgggcatgtgggagacagtttaacctacatgagctggtgaatacctcgtgggactttaaaaaaaaaaaaaacttccgatgtttacatttcaaacagtttctcattttttgtttgtgtgaaccctgttttcaagaaccatcttactaattatgtagcttgtgttatagcaggctctgggatacaatcacaaactaaggcaggtctttctctgcattaccaaggaaatgaaaatgttagggaactgacatgtgagatttcattggtggaaatctcaaagacaggatacctgaaaccaaaataacaaggtgaagagttaagggagaagtgttttaggttttgttttgttttactttgctttttttaatctataggaatatactataattgtcttccaacacaccagaagagggaattagatcccattacaggtgattgtaagccaccatgtggttcctgggaattgaactctagaagagcagtcagtgctcttaaccactgagcccactttccagcccaagagaagtgttttttatggaacaaaacatgtaaaatgcaaggctgggaagaaggaaaggcattggcatactcgtaaaaagtcaaataaagctagtggctgaagctgagtgctgtagacattagtgtagttcagtgggccatgctttgggttttgctttagatatactaggcccatttatttactttgtgtatatattcattcatgtttatgtgtacttgtgttgatgtgagtgtgcattgccacagtgtgagtgtataggtcagaggacaacctgtaggaatctgttctctctgggctcaggggatggaacacaggtcattagacttagtgccaggcacctttactcactgaactattttgccaacctctcctttcccccattttttaaagataacattctagaggactgggtagattgctcagtggttaagaacactggctgttctttcataggactgagctaggcttctgcaaacattaggcacatacatgctataaatacagtttcaggcagaatgactggtgtacaaataaagtaatgaatctcatcaggccaggtggcatatgtctaatcccagcactcatgcagcagggcaggcaagctgctcaagttttagcccagtctatgtagccctggtctacatagtgagttttgggccaaccggagcaacatagtgaggctctgtcttaaatacatacatatatacataaatattgttttgtatttgaagggcttatttgcctattttatctgtttcttctttctctcttactttcattttagtcccatgagcgtgtaagcaagcgtctgcatcagcggttccaggcctgggtggataaatggaccaaggagcatgtgcctcgggaaatggcagcagagaccagcaaatggctcatgggtgaggggctcgagggcctggtaccctgcaccaccacctgtgatacagagactctgcactttgtgagcattaacaaatatcgtgtcaaatacggcacagtattcaaagccccttaactgcagagccagagcaggtagctcagaggtgtgtgtgtgtgtatgtgtgtgaatatgtgtgtgtatgtgtgtgtgtgggggcatgtgtactcatgtacactgaagaatcaaggaagatgcctttcaagccaccagtgcaaccaggcaccagcaggatacacgaaaggaatgcgaatggatggataccttaggaagctggaactggcacttttcccacgggtactacccagacccaacagggaatgaagtccatgcaagcacagagacaggcagcttgcttgcacacaccagcagagctcaactacaacttcctatgacctgagcaaccagatgctgtccccatttggatggatggatggaggtgcatcttgtcactgctccttttcccacctccaaaaaagagaggggaggggagccaggatttgatgataccctgacttgagcacagctaagatctctgttagattttatctgagacctgtttggctttggaattaataacttatggatttggtttctgagtccttgaagttcaccttcttccctcttctggttctcggcctcaacaaattccagtcagtcctcctttttagctcccatgggactgttttgtacctgcttctttactagtctgccctagtgccatccaccagcttctctctcacacgcacacatgcacacacatgcacacacacacaattttaacttggtttttcttttttgtaaataatgtacatactgtcaattttttattaaagaaatatgctttgatgtgctagcataactgctctagcttcttgtgtaccatagtaccatgtggcttcagatttagtacctataaacagatgtacaagacatttattacactttttaccaaagggagataccattgtagtacttttgtgtaaaacttgtctttcccccaacaacttactttctttttcctttttttttttaaatgtaaataaagcttgattcttaaggaaataagtaacataagtcccttgtcctctccaaagagctgttgtaaagttgggactggctttaatttctccaggttacaaataggattttgctttaaataaataagtacttgtaattgtcaaattaacatatcaacagtgaggccagtgggatggctccatagataaaagtgtttgccacataagcctgacaagtttgctctctggatccaatagtggaaggcaagatctgactcccaggagtgctgtgccctgtggcacctgagtgcttgttcttgtgctcacgcacaggcacaccgcacctaggctcctatttcccctctcaaagttctaatttcccttactgggaataaggctacaattcaggataccgagccaaagagtcaagtgtatttgtagaaattcgaagggaatgaattttacattgcttagcaacatacaccaacaaatgcttttaaaattgtagcgtgggcctttaatctcagcactcagaaggaagaaacagatctctgtgagttcagagctagcctggtctacataacttcaggatagccagggccacaaaaagaccttgtctcaaaaaataagattaagaaaattttttacatttatttgtatgtgtgcacatatgcatcaacgtgcaagtgtcaaagtcagaacaacttgtagtcagttctaggacttgaattaggtttcaggcttggctgcaagcgcatttatttgtgctagtatccccatccatctcactagactccacttcttaaaagttacatttaaacgtgatccataacattggggtggggtgggggctcaaatgtggttggcctggactttctgaacaacagactagctgtcatagaattcgacagccatcacctagcaagtcataaccaggtattttatcttccatttaaaaatcctcagtcctggggtcagtgagatggctcagctgggtaaggttcttgccactaagcctaaagacctgagttttgagccccaggccccacatatcccacccccaaccaaataaattgtaacaatgtttttaaaatccccagcaccaccataaagaaaaataatttgacttctaggttttcaaaaggtggcacagtcctttaatcccagcacttgggaggcagaggcagggggatttcagagttcaaggccagtctggtctacaaagtgagttccaggacagccagggcttatacagagaaaccatgtcttgaaaaaaaaaaaaaaaaactcatgaattttgccttggactcctgaattctgggaatacaggtgtgtgtcaccatatcctgcttttagggtgtttttctcataggaggacaaggaaacttggaagtaatcaagcctaatgggaaaatgtagggcagtggctgaggcagcatgccaggaagaaagggtctggcttcctcagctatggttcacctctccccctctatttccttaagactgctggcctagaaggatggggagcatgggtctgaccagcagcagccttggcagttgctacctatgtactatgtactgcacctccctgcaggtcagggtaagatttcagggcccttttaggagaaaaagtccttgtgaccaataaaacaagggactttgctcaagttttgacaagttattttaattggcattgtatatttcttacttgatcatttttctgggtaacctgcatttggaatgtaaacctggttatttccattaaagcaggctagttagattcctcctgtattattttcttccagactcctgcaaacgttaaagctggaggttagctcttggcattcaaacttccttgcacttgttgacctgcgttagatcaaaattctggacattggggtaatgggcaacggtgatgcatgtaatgtaatggaggattactggtgtgcaaagccccttttctgtatttctgaaaacacccgaagtagccttgcgcttttcatattatgcagttaccaatgcttgagtaagtgaagagaatggaaaactaaacctttcccatgcccttccaggggttccctccctagcccttccttcagaataccaagtagctcaggctgtactcaaaggcgctacattgtcgcagattactccaatttacacttcctggtctgtgaactttgtgcatcctaggcaagcactctccctaccgaaccacaccaccagctcaaacttaccattgtattttaaaataatttacccagctgtctgacagcaaggctgaggtgagaaccgcgaaggctcagcttccgggtttcactgggaggctccccagagccagcctcttgcaaaagccgtggtgttcccagaaaagctgctcgggtctgtaagctggttggatgccggaacctttggttccaagcggtgcaacgagccggcagcaccaaggatcttccggggagggaaggcgcatcgccatggcggcagcgccgttcttgaagcactggcgcaccactttcgagcgggtggagaagttcgtgtccccgatctacttcaccgactgtaaccttcgcggcaggtgtggtccttggcctaccacacccgcgcgctctccccttcccttccggagggaaacccaggccgtggccaaccgggccgcggaacaaagttcccgccactgccaggccaggggctggggagcgaacggtagaggttggtctgtgctgctgagctgccaggcagtcctcacggccttagccaagggagagcgtttccccagccatccgctggctcacgggtgggacaggggcggcttcgagcatgcgcccatcagctgctcctgcccaggctcttcggggacagctgctcggtgacactctccagcttcctgacgcccgagaggcttccctatgagaaggcggtgcagcagaacttcagccctgcgcaggtcggcgacagcttcggacccacgtgggtaacgcccagtttggcgaagctccgccccacgaccaaaccctagtctgctagatagcagagtggcgccctctgctgagagaagctcctttatccttcggcgtcttcacttgagtattttcatccctgctgcctctccccctttccctttattctttgaccatttctctgatgctgcacatgcatggagaacatcttaaagccgagggtttccactcctaggcccatcaaaatggctctcttacagatggtggacctgctggtttcgggtagaactggtcatccctgaagtttgggtgggccaggaagttcatctttgctgggaaagcgatggagaaagccttgtctggcgtgatggggaacctgtccaggtgaggtgttctctcttagagccagatactgccacagattagcctggtttttggagaagccacagctgaatgaatgggtctccagagtaatttcatgatttcggaactgaggaaattgccagtgtttagacacacccgaagaggttatcagatcccattacagatggttgtaagccaccagaatttggacaccagtgttataaatccccagttttcataagctagttttattgtgtatagtacatatgtattgggggaaacttcaaatcattctaaaatgatataaagtaaggtattaagttatcttcccatgaataatgaatttcttttaactgcacttcacattccccagatgttaaatgttaaatgtcataccaggtttaatctttgtaatgctatgtgatgacactttatatccattatagattttaaaaaactaagacatttctttgttggtctatgcagcttccgtttcaaagtccagtaactgggtcctaaaagaagtcagagccctagccgggcgtggtgctgcacgcctttaatcccagcactcgggaggcagaggcaggtggatttctgagttcgaggccagcctggtctacaaagtgagcaccaggacaaccagggctatacagagaaaccctgtctcgaaaaaacaaacaaaaaaaaaaaaacaaacaaacaaacaaaacaaaacaaaaaaaagaagtcagagccctatccaactttcttctcttcgatggcacccacctaactgaacactgaggatgaaccaatctatcttaaactccttgggcttcttttttaattaatataacccagaaccaccacaaattctagacaaatgttctcaccactgagctaatccatctcccacctccctaatttctccttaattcgagaaagggtcttgctgaatgatccctgatagtagccttgatcttgttattctctaccatggacctcccaagtagctagaattatagacctgtattaatatatctgcctcactccatggggttttcttttatatattcatgggtaaaaaggctaccagagggggttggagagatggctcagtggactgactgctaagagcactgactgctcttccagaggtcctgagttcaaattcccagcaaccacatgtgacttacagccatctgtaatgggatctgatgctctattctggtgtgtctgaagacagcatacagtgtaccaatacatacattaaataaataaatcttaagaaagaaaagctaccaaccaggcctcctaatccctgcccaagatccttcccataagaccatctgtagggaccttgaagttaacccaagacaccccaattcaggttctttgcacaaatgaaattgatttgtttcagagggcagagaataagagacaaagacaggagaccgaggacaagggagaagggaaagaggtgtttgtcccagaagacaaaggtctaagaaaatggcagtctataaagctacaagaagaaagcctatgttgggatgaggtggtctaatcccaaataagagaatagaccttggtggctagctttagggatgtaatctagcagttttacaaggcagaaggaagtgggaagaagggcaaggcctgccatagccgtgcttgccgagctccagctccccagagtcccttcaccactgctagcaaacataaactgcgtgctggtcaccgatgggtggaacacttgctaccaaggttccctgattactttatcctagcctttcctggtatcggtgattcagggcagggcagctggatggcagagcctggccctcattggctttactcgaccttcgaattttctaatggcctcaagcccggtcttctcttttctctaccagggtttgaccaaagaaggcgaaaagaccagttatgtcctgagcgagaggctgcgagcatcagaccctcggaggtaagcatccgcttacacagatgtgttcacataagtgaaatcttaatatctcctttctcgtggtaaatataaaagaacatggggaaattaattactcctattatccttctaccagggatgaccatctttttttttttttttttttttggtgtttggagacagggtttctctgtgtagccctggtgccctggctgtcctggaactcactttgtagaccaggctggcctcgaactcagaaatccgcctgcctctgcctcccaagtgctgggattaaaggtgtgtgccaccaccgcccggcagggatgaccattcttatcatctccgtcttcataatctcaaaatgtctttgagcagaagcaccttttactagatgaaagttatttctctgatattttacaccctaccttttacattccattatttcatattgagggagcatgttttctataccatgaaaagctaagatattgggtttggctgtttgttgttatttatttgttgttttgttttgtttgaaacaggatcccattctatatccctggctgtcctagaactcactatgtagaccatgttggccttgaactcacatagatctacttgcttcctcccaagtgctgggattaaagttgggtgctaccatgcatgattattgcagtgtatatttaactgtgcatttttgtttgtttgtttgtttgttttctttggcttggtttagtttttttgagacaaggtttctctgtatagccctggatgtcctggaactcactctgtagaccagagcctcagacttcatagatccatctgcctctgtcctgcctctcaagtgttaggattaaaaaggcctctgccaccactgcccagtgttaactgtatattgtttcagattcctccaacactgtgaatatggtaaggtggccttgaagggcagacggaaatagtcataaaattatgaaactgctgaagattctggaagaacagactgaggactccattgccagactaggagggctggagtcagaaaggctaccctttagtgatgctgagtttagctccagcagaggaacctgctgcccaggtgctgcctccaggaactggtgtactatgttagctagtggagcttgggactgaaagtcagccttggaagagccaaacatgtttgctgtgcagcaaaggctttaaggccaagagtactttgtacagacagccttggaaatatgaagctaaatagcagtatagctcataggaatccaaatttagccaaagcagaacactcctctgcaggacataggtttgaactggtatttctaccatgatcctcccacacctaaacctgacatcccatgggttcctctgggaagtgggtcctaggcgtaaatggggggggggggcaactgaatgcctgctacttgcactcttgtcaagctcccagcatcttctgccagttcactggcctgagactgcctctctatatttatagcttgactctctatgtggaagtagcctgcaatgggcttctgggggccgggaagggaagcatgatcgcagcccctgacccagagaagatgttccagctgagccaggctaaactggctgtgttccaccgggatgtccacagtctcctggtggacctggagctgttgctgggtgtggccaaggtactggagccccacccccatccagatccctactccaggcacattgtttgagttggggcaccaacaggagtaaagggttaaaagtggggagctttgctgagaacccttgagagaccagctagagccttgctatagtagtgcttgaggagtcttttaaagtacagaaccctgatgcagggcctcggggaggacagccagcgcagcttccaggccctgcacacagccaaccagatggtgaacatatgtgaccctgctcagcctgagacttacccagcagccaaagccctggcctccaagttctttggccaacatggaggtgaaagccagcataccatccatgccatgggacactgtcacattgatacaggtaaggcaccattgttcgttagggtgccaggtgcccttaaagccttgagtgtggctgaaacctgcgatatgatcattggtaatctttggccttctggaccttatttttccacttgtgtaaaataaatcagggacattagatcatgggctccgttggctgtggcttgcttattcttccaacaaaagctgatagctcacgaggccctgtggcagatactggatacgtagcattgtggagactggttactgcagagtgaccaggtgtggtgatgctgtatatgagacctggagccagaagaggtatttcacccagctaggttagggagtctgagatttcctagcaaagtgacatttgatttacgtgatgatgacacagggacccccaagcacagggaccaggtcaggtgttcagctttgaggccgagtttgtaggatccttgagagttttcagttctttgtttgctcattgttactgtgcctgagtccaggcctttgctatctatgtagcactggtaggttttgcactgatagcagtcctccaattcagcttcctgaatgctggattacaggtgtgagccgctgcacctcgaaatgtgtgttttttagccagctccttgctgtactgattcagatgcagctaaggtttctgaccatggaacaagggctgatgaagttggacctgaggcctagaggtcaggagcaactggaggtcatacaacttgcccagataagcccacgctatgcctcgttctagtacctttgtctctggggaatctgagccttaatgtaaggctcgtccaggacctggtacctgtgtcctggcagttggtctcagtccttcctgcccaacccgctcctcctatcttgcaggagggacatgaagtaacagcacaataggggcaccacataggtctgcagggtagacctagataggaagagggctgggctgacccactggagccttaggctgggtctgtcatggtttgggtacaggggagggctgctgatctccaaagagcaggaacctttttatctcctcactctgtcccccacccccagcctggctttggcccttcaaggagactgtgaggaaatgtgcccggagctggtcgacagctgtgacgctcatggagcagaacacagacttcatctttgcctgctctcaggtcagagggcagctgtgtgaagcagatgggcccgaagcggggacctaaaagaccaagagtgtcccttacctttagctacccgcagggccaccggatgcttgactgtgagtagtgtcctttttactcctggcccaactcccaccccatgttccccacaggcacaacaacttgaatgggtcaagagccagtaccctggtctgcatgcccggctccaggagtttgcctgccgaggacagtttgtgcctgtggggggcacctgggtagaaatggtaagtgcccatccctggtactatcttccagcagctagtcagttgagcctgaaatgagcaagacagcctcttcccggggttataaccctgtgttagtgcacccattgcacttctacaacaaagtgaagttggcccagggtcctacccgtgtctagtctggtgctaactccaactgtcttgctgttctgtccccccatcccccgaccccaacaggatgggaaccttcccagtggagaggccatggtgaggcagttcctgcagggccagaacttctttctgcaagagtttgggaagatgtgctctgaggtagtctgggagctggcaccgcagactatccccaggggacacggggacttggctgaggcagctccactgagagctgagagccttatccccgcagttctggctgccagacacgtttggctactcagcacagctcccccagatcatgcaaggctgtggcatcaagcgcttcctgacccagaaactgagctggaacttggtcaactcctttccagtaagcaagccccaggggtcaggggtcagggtctggatcccacttggcccactcaaccctttccagagtgtggtaggcctgtgcctgggtcacagctaccatggatgtggatcgacatcgcctcaggcctgtctctagcctctgccctgcccttctctgcctgcagcaccatacctttttctgggaggggctggatggctcccgagtgctggtccacttcccacctggagactcatatggaatgcagggcagtgtggaggaggtgaggggacacgggatgctgggcttttcagagagggctgggtatcttgtcctaggctgacatgtccctacccatctaggtgcttaagactgtgaccaacaaccgggacaaggggcggaccaaccacagtggcttcctcttcggcttcggggatgggggaggtggccccacacagaccatgttggaccgattgaagcggctgagcaacactgatgggctgcccaggtcaggcctgagccatcatcagccattttcatgtagctctgccctcgagcccttgccttgagcctgccctttgtttatatatgaaatttaactcctccactggaccttgtatctctcaatcctgacccatcatcttccaaacttctaccttgaggatatggtgcagggaaattctgaggtagcaagaggcttgaggccaacagagtgcagctctatatttagggaattggctagggagtggtttctttgttggggcctctggcctgcactgtagtcaaaggacaaactataggactctcagctgggagcccaggcttgtggtcttcctcagggtgcagctatcttctcctggccagctcttcacggcactggagagagactcaggacagctgtgcacatgggttggagaactcttcctggaactgcacaatggcacctacactacgcatgcccaggtcagggccaggctaccagcctagtcaatacctgatatgcatcgggctgtggggaaagggttggggaggggcagggctagagctcagtgggctgtttctccaagtagaggcttggaaaagaggcaccagagctgggttaatcccgaacacagacagcgggtgggacagagcctttccagaggaggagggtttgggtgggaggtcacttgaggtaagttttctatgagaggccttgggaggctgtcaagggttctgagcaagagagagctttggacggtgtcctgggtcacatcagaatttaaggtgaccctccctccctgggcacagctcaagaaggggaacagagaatgtgagcagattcttcatgacgtggaggtgctcagcagcctggccctagcccgaagtgcccagttcctatacccggcagcccagctgcagcacctctggaggtcagtcaggtaccccttcctgctggtcacctgacttctagccctgccatagcctgcctctcccagccttccctgtctctctgcctttggtccctgtaggctcctgctcctcaaccagttccatgatgtggtgactggaagctgcattcagctggtggcagaagatgccatgaactactatgaaggtgaggccaaccttcgtaccagtccttctgctctcagggctaagcgggacggacccgatgctcacccatggccaaacccatctctcttcagacatccgttctcatggcaacccactgctcagtgctgcagccgcagccttgtgtgccggggagccaggtcccaagggcctcctcattatcaacacactgccctggaagcgcactgaagtgttggcactgcccaagccttgtggggctcacagcctaggtatgagctgacagggggaagctggtcttgcagcaggaaaatcgaaggctagacagcatgacaaggatactccccagggaatctttaccttggggtatcccaatctggagagaagtagccgtgtactatcccatccagcctatccttaacctgagcaaggtgtctagaccttcagagaggctacactgatgcctaggccttgtccccagccctggtgacagtgccaagtattggctacgctcctgctcccacccctacttcactgcagcccctcctcccccagcagcctgtgtttgtgatgcaggaggtaagtcctagcagctcccaatggggtggggcctagactggggttctccttggtctggagccaggggctggggcaatgcacagctttaggagggttgggttgggctgggggggtgggggtggggaacactactcactcggctcaaggaccctcccctccaagactgacggttctgtgactttggacaacggcatcatccgggtgagactggatccaactggctgtcttacctccctggtcctggtggcttctggcaggtgctaacccttcactgttcttaatcccatgcctggctagttcatcccaaactataccatcttcccactgttccctggccactacactatccaagtagtctacaagtacctctagactggaacccacacatggagcagggtaggctgggctagcagcaccctgacccttggccctatttaacctgtccccaccaattatagctggagagaccaccaatccctatgtccttccagggaagccattgctgagggagccctggggaaccagtttgtgttgtttgatgatgtgccattgtactgggatgcatgggatgtcatggattaccatctagagacacggtacttcttgggcaggacctgagggtggctgtgtatgcacgcttctctggcttagtgccactcgccttcatcccacaggaagcctgtgctgggccaggcagggaccctggcagtgggcactgaaggtggcctccggggcagtgcctggttcctgctccagatcagccccaacagccggctcagccaggaggttgtgctagatgttggctgcccctatgtccgcttccacactgaggtagaaatggcagggtagtggccatcttttccgggtatggctggtgaggaggcctgaggtcattctcttatgcccaccctctgccccccatttcaggtgcactggcacgaggcccacaagttcctgaaggtggagttccctgctagaatacggagcccccaggctacctatgagatccagtttgggcacctccagaggccgacgcacaacaacacctcttgggactgggctcgctacgaggtctgacatgaggactgggtgggacttgtactctccctgtctggggagagactgtgggttgaggacaagagggaaacaatgactgacacctgtgctctctaacatgggccaggcatttgctacctgctttactttggtttggtactatatagccactgttaccatttcacagatgaggaagcaggcagacaggtgggatggcatgccccaagcttccttgagtggcagctaggatgcaaccatgggctctagaacttactgtcgcccaactgaaaggggctctgggatgcagccacccataggccttggatctgcccttcaggtgtgggctcaccgctggatagatctgtccgagtgtgactttgggctggccctgctcaacaactgcaagtatggagcatcagtacgaggcaacgtcctcagcctctcactgtgagtgcagtgcccgctgggttcaggactggctggggtttgtgggagcttcctgtgctggaactccagcccctcatctctcccacccactccaggttgcgtgcacccaaggctccagacgctactgctgacatggggcgccatgaattcacttacgctttgatgccacacaagggtatgtaccagcgtagcagggcccctctgtggctcttgaccacctctgtgccctttcctgaggtaaggggtaaaccgaggcatcggggtaaatggaggcagcccagccccagtcccctccagaggcaccgcagggagctcccactgtccacatgtgtttctttctggtcataccccaggctccttccaagaagctggtgtcatccatgctgcctacaacctcaactttcccctgctggcactgccggctccaggcccggcccctgacaccacctggagtgccttttctgtgtcttcaccagcagtagtgctggagaccatcaagcaggcaagggagaatagactggggagaatagactggggaggctcctggggtgcacaagttcttggccctgcccactgtcctgccttcctccaccaggctgagaggtgccatcagcaccgcacactggttctaaggctgtacgaggctcatggcagccatgtggactgctggctgcacacgtcgttgcctgttcaggaggccaccctgtgagtggagactcggtagaggtagaggtgggagtcctgcccttgtcggtcctcatggcctctcctgttctccatctagttgtgacctcctggagcagcgagaccccactggtcacctttccctccaggacaaccgtctgaagctcactttttctcccttccaagtgagatccctattgcttgtgcttcagtctccaccaaactgagtcttgactggatagctttgggagttcctcatttccacctccctagcccgaagcatcttgtgcaataaaagcttagattagcagcactataatggtgccttgctgtttctcataaggctgctctgcacgggctgtaaggagggagagtatttccaggggcaagacctaaggttaccggtgtgtgcagggtctggcttccatctcagatactggagacctcgggtgaccataagccaagggactttgagataaaaagtcagcagggagatgatggctggacaggaggcctggagcctgcctcctctgacccccatatcatctcactcctcccccctcaactgggagggaagctgtgggcaagtgttaaactgggagaacagccagccatagaccctgatgcctcctggagctaagctgggagaacagccaaccataggccctgatgcctcctggatgggaagagctatggatgacaccttgggactgcctgggcccaggtctgcagaggcagaatgtcctctgatagtcatggccttgagtgtatatgtggggggttgggggaagggaggggagacaaggaattaaatatataaataggtggagccatgcagccagcctttccaacctggctttctcataccttatataggtagcctgcccaagaagtaccaagaagttcaaatttattagtttaataatggttttcactttggatttaaaaaatgttgaagatggcttacatttccaacactttgggaggcagaagcaggcagatctctgaatttgaggccagcttggtctacagagtgagttccaggacagccagggctacacagagaaacccttgttttgaaaaagtagacaacagcaaatcagtgagtggagtgtggcagcttggctcacacctgtaaccccggcaaccatggacatggagcagaaagaccaaacgggagttcaatgtcatcttcagatccacatgggttcaaggataggacatacaaagccctgcccccaaaaaacagttatgcaggaaaagtcacggggcctagggcatgcagccctacaaatactgcttttagggattcagacatgccccaggattcacagcaagtcatcagggaaggagacctccatctatgaagctgaactctccccagcctccctgggtcgggtgtcaggtatagtctttgggcgtctgcggtggcctgtgtggagagcaagggaggcagtgactgtgtgtcctccccctgttgaccctgcactatctcccgtcctccctcgagagccactcccaggggtccctcttcccggctcaagaaggatgctcacctgtgctcgcccgttgccccctcctcttccctttctcaggagctgtaggggtttcctggttttgttggaggccggccccttcagactgttgagctattctcttaggagggtgcttcctggccctccgcatcctggaaacggacttgcttgaaagtggaaggtcctgggtagaaatggtccttactgaattttcttctagcagtttacatgttcgctagggccgactgctgacattacccactgggccccaaccctcccatgattggcctggccagtgcaagtgcagaggcaggtgtggcagccatacctctttcctgtcctcagcccccagctgtgtctcctgtgacttctttttttgggatctgccccctgtagaatgttctattggagctagagagctcaagggcttcagcccctctctagactcttactgcagtgtgattccaaggctggagaggggtgggaggatgggtatccaaagccatgggggtttttggctctttatttcttacattatgagctacttacctttgggtgccaagggtccgggatcaccctgaaatggaatggagacaactctggagtcaacctggtttgatgaaggggcagttttacttggagtggcaaggccatatccttacttatctctccgtgactcagacctctagcttctaccttgttatcccaccagcttccctggggtctccattcgccaatatgagtatagggctcgaacctggaaccagatggtacggccatgccggtctcgcagggagctcatgcctggcacaccatagcaccgaagccaggctcgaaaggcagcaaaatcctcctctccacgctctggcccatagcctttgccccctgagggacagaggaactggtcagaggtgagagggtcgtgtggggtgggaggaacagtgagcctggttcaacctgatccaggccacactgcctcctctcactgtgactaggcctgtgttcctccgctctgggtcctggcctctccatcagcaaggccaaatctctaccccacctgctgcatagaaggctggtagaaagtggaaacttgccaagagacctggtctgttgaacaaactcccatcccttgagccaggacagctgtccagcaccttacagaggctaaggtagaggccgccggccatcttgacctccccaggcctcacccagctgaaccacttccttgggcaccaagtgacacagttccagcaggtctgggttctgtagtttggccttgatcttctggctcagggtcagctctgggctctaaaggtgggtatgggcagaaacaaggtgtcaacacagggtactcacacacagtggacttctataagcttggcaagacctttagtgtggtttacacccactccacacacatggtgggctaaggcagacacaactgactctacccacacccttgccacccactctagcaggagagccagcacacacatgcttgctcactgtcctcaccggccggcactgttgcagggcctctagaactgtacgagccttctcaaaaggagggatcttcagcctggagtggtggggagggcccatgataagtagtggatgtggtcacccatgtcccaccccagccattgtacccagagcctgtctgctgaccggtacaggatctctgcccgcagatagttgccaatgccattgaagaacctctggtccaacaaggcctcgcagatgggccggtcaaaggctttgtctgataggttccgaagtacgttctctctgcagggacacaggctggatgcatgagacccatcctacatcccaggattgggaagaagagctggggagtctgatcctgagtgcaaggacaaaccattccagctccctctggtctccgtactatttgggcagctggagcctcagtttttctatttgttaaatgggaaaaaaaaatctaggattaagtttatttttcagccaggcatggtgattctcacctgtaaatcctaacacttgggaggctgagacaagaagagaggcgagtttggggccaggcagggctacataaaaaggccctgtgtgtgtgtgcgcgcgcgcgcgcgcgcgcgcgtgtgtgcacacgtgtacgtacacacaaacacacacacacaggcctggtgtgatgtgccaaggcgtggcagcacacctgtaatcctaacactgggaaggctgagacagtaatcccactgccatgaggatgtagcaaatcctggaatagagtgaagtccagtctcagccccctgaccccaaagtgtgaaggaccagaaggtggcgggatgagtgtgatgaggattaaaaaaaaaaaaaagtagatgctccagtgtggttctgccctccatccccaaggcacccagccggtggactgcaaacagctttgaggtctatcaagagacttaacaggaccagcagccaagcagcctttggtccccaacttcccagaaaagaccaagcaacaataacccagggctattctgtgacaccagagatgtgaccaagtgtagggctccgcagaagcacatcatctatttccagggaggaaaatgagaacgggccaggtcctctccaggcttacacccctcaagttcttgccagcaaggctttcctccaagatttaaacagcttcccagtctccatcagccaaaccccagcttgaaggtcacttccctagaatggccatgcctcctgagatccccacctttggccaaagtctcctggccccatcttacccgcacgtcatcaatgtggtgaaagtttgctttgcccactgctgtcccctacagagcctgtctcacagcagagacccttattgcctctttagaggcaggttctgatgacagggacggtcacagaggaagccccaggacatagacaggtaagcagtcagaacagagaaccaaaacttgactcagaaactcaatcactaggctatcctctccccactgtgcaggcttgtttcttaagtactacaaaagcctgatgctgtttctgtatcctcagacctccggctggtctccctcctttgggctgccctctcatagacaccatctcgatagatgagggactgaggcttagtagagggctgggatttgtttcttattggtctagtgctccacatacccaggcctacctgaaccgttcatactccagcaagacacagggtccacggcctggttgccattcacccccaggatcccagtggccaaagcgacggatgtctacgaagcaaagggcaagccggggagcaggtggggctgtgtaaaaacgtagatgggcgtggcggggcagtgcctctgcgggtaccagctggaaggatcctgacatcccaaagcggaagacaagggacagtggcttctgagggggctgggacccaggcagggggctcaatgtcaagcgcagctccttgcctcgggctaaagctgagatgtggtaggcactgctctcaaagggcacctccgggttccggctgacagaggacttctccacacacccaccaaataccagccccttacatgtctcattcacaaagtggctggccaggtgcagctctgggccctctggcattctgaaggaggaatggctgggccctgtagtaggaagaggacaacaggtcgtgccagaaatgtcttgttcagtaggaattattaccaagtttgtacagaggaaaagtcagagacacagagaggcatagcgccatataggataggcaaagaaatggtggcctggccacccatccaaggtactgggtaccaggaagctgaagctgggaggcacatggctgtcttgctcactggtgctttccttccatggcctccacacctcgctttagaatacagttcagattcttgctggagcctattaccttgtgtcccccaatccctcctacccacttataaacctgttcctccccaactcctggcctttgcccctgctgcctcccatcccacacacagtaggaagtttgaaggaggccttctctctccctaatccacatcttaacttaggagctcccaaagttcaaagctactcagcatctgttctagcacctcacggcacccaaggcaaagctcgggtcactcatccactacagctcaatcaggccctgaatctgtctacatccacggaggtagaaactcaaatgtgcgctggaccaatgggattgacctagcctgccatggtcacccaggcagaagagagaggctttctcccggctgccttcttgtcaggacaggaggcagaagtaggagaagggtaagctccaatctgtgcacagccctgttctcatggatccctggggtgccaggaaggacagggctctcgttctttgtcctcaccaccctcctctatccctcacctcgcgctttgctactagcaagatctgaggagaaggtaggtagggaagacgggcggttttaaagtagacgcgttgggggcttggcaccaaaaagggttcggtttgcggaaaaccttcagagtcctagttttgcgaggtgtgagatagcgcacacacccaacaaaattttggtttctctgtctttcccgggctcccagatcctttagatcttcacctttactgagaccccgaatcgcccccattaaagttgaatgaatacctgctctggttactgctcaacctgaggcagcagccagtaaggggttaatcccagcagtctgccgaacttcagagcacgctgggaaaggctagagacactctggtacctgctgggaaatgtagttttctcaggcaggcggcgcagtatggaatggagttccttatttatgagaatcccgggtgttgggcaagctttggagcagtcgcgtaacccggaggtgacgaaagaactgtgagcagagccttgttccgaactggtgcccggagtcgcagctgcgtctgcagttgaagtcaccagttagcctggccaggattgacgccagcagccggaaacggcgctgtgtagagccacaagcagctgtatgcgaggcatacacaggtgcaagataaacaatccctggggacccaagatggccgtgtcaatgagcagtcagatgtaacatataaacaactttatcacggcctgcgggagctgaggggccgagaggggggaatgcatccggcaataccacaggggcttctctctggggcagcactaggtaaagtcaggagttaggcacaaaagcttggtttgactgtcacaacctcaggcaaaaaaaaaaaaaaagtgtcggcaagataccttttgccaggcaaaagggatcgattcaaagttcaggaacagaagctgaggaaggcctgtgtggctgccgcaggggtgagtggtgatgggtaggctaggggagaacaagaggagagaaacattggtgaggctgagcctcaaacgtccctgggagatggaagcagcattattaaaacgtataaaagagaaagaaagcctctgcaggtgcgttgtgctgaccaacagcggagactcacccttttacacactattatttctcttgttcctccagtcacccatttactcatttcttatattttttaggagaggacggttaaagagagggtcttgctatgtattcctcattgtcctgggcctcagactggttcccagcttcccctgatcttctcttcagcctcctcagtaagaactgggatgataggaaagggccactgtgtggtttgaatgagaatggcctccacaggcttcccgtctcatcaggcggctgtactcacgtgttcaagcatgaactagcaagctcgcacacacatggggtggggagggagatgataaaaatgtcttaagaaacacagcgtgtggaatataagcagagtggaatattatacactgcctgccacaggtagcagcataggtgattttgaggatattatgctaggtggtaggtaggtcagttacagaaggacaaacactgagattccatttatgtgagaagtccacattaatcagacacacagagtgaggagaaagattgttgaagatggggtaggggaggagaggttgatagtaggaataaagttccagttgcctaagatgagcaagtgcagcatgcggtctgtagctaacactgttgtacagcaaactctctgttggattcttttttattgtcgttgtgctgtgtatatgatgtgtgtgtgtgtgtgggaggtattcatgtaccacagtgcacatgcggaagtcggagtcaggtctctctggccagttgaagcaggcctctcttgtttatgctgctgtactgcactccaggctggctggccccagagcttctgaacagctctcccgcctgcacctcccatctccctctccatttaagaggagttttgaggttctagatgctggctataacatgggtttcccacctcagaaagcaaacgcctctacccctgagccatcttgctggcccgtgttaactgttcttgtcacaaatcagggagtatattttatcttctgctccctaatttgcccgtgtagttattctcagtagctcattcttcgtgaaattcaaatattctctcctgtacagaagccactttgtttatgcagtttacgcctggaggacatctgggtatgtacctgtgattgtttctcaaccaccatgcaaatatccactttcacatcaacatttaaaatctttttttaaaatgcagggactctctatgtagccctggctttcctgggaactggctctgtagatcaagctggctttgaactcacagagatccacctgtctctgcttcagcttttccccctttttctttgggtttttcagacagggtttctctgcccttgccctggctgttctggaactttctctgtagaccaggctggcctcaactcatagagatctgcctgcctctgtctcccgagtgctgagactacaggtgtgcaccgctgctccccggcttcccagcttaacattttaatgttgctttttaccatgtgggggtggggctcacatgtgccctggagtgtgtatctgtgaaggtcaggtgacaattttccggagttcattcttcctttcactatgcagacctcagagattaaactcaggtcaccaggcttgggggcagtgacccactgagccatctcacgggaccccctaatcaacacttcatccaaaggtttctaacctttgatgatttgccacaatcaacattttttgtttatttgtggccgaggattgaacccagggcattgtgaattctgggcaaactctctacctctgagctctatcaccaacctttttaaaaaagatttattttaagacaacagttttagtaagctgtgaaaactgccatcctcctgtctcagcctctcaagtactgagattagggatgtgagccacaaggctacagagaggttaaatgagaaatcagagccctttagccttttctcctttgttctggagggtgtagccattttgggcaaatgctgcttagtgagttcactaagaagcctccccaggaagaccctatgaccatgcccaaaatcctgtttcagcctctggggcagctgggatggtaggtttgtaccagtggcctagctccccacttgagatctacttagcaattgtggaatattgacctccttctcctcctatccctcttcctactcctttttttgatgtctcctgtatcttacttgcttgtatagcaaagctgaacttggaccctaatcctctgccttcatttcccaggtgctgggattacaggtgtgcaccactgtgtcaggctgtattctattaatacttatatagcaactatttgcaatttctgtaaaaatgagtttcaccttactgactatgactttgtttttgttttgatggagggtgggggtggatagcaattccctctttatgtagccctggctgtcctggaactcattatgtagatcaggttgaccttcctgcctctacttccagagagctgagattaaaggtgtaatccacccatgctgactatgttttttttaaagtattatatatttatttttatttatacatgtacactgtagctgtcttcagacacaccagaagagggcatcagatctcattacagatacttgtgagccaccatgtggttgctggaatttgaactcaggacctctggaagagtagtcagtgctcttaactgctgagccatctcaccagccccaagatctttcttttttttggggagggggggtttgagacagggtttctctgtatagccctggctgtcctggaactcactttgtagacagggctggccttgaacgcagaaatccgcctgcctctgcctcctgagtgctgggattaaaggcgtgcgccaccacgcccagctcagtcagtactcttaaccatccttttggcccccatgtctgctttcttgatttgtagcatctttgatagaaatgctgtatgttatgttactttgtggttagaaaatcagcctgcagagatactgtctctacttaaaaaaaaaaaaaaaaaaaagtgtgttagcaaacaggtgctgggtttaaaggcctgcgccaccatacctggtgcttttaaccagtttttagactgattttggtgcagcgactgtgtccaatagtgacaaactgcataggtatgctttaagggtgctttttcctccttgtccttttgaacttaggaatttgtaaacagttttccttcctaacaattctttcatgtgtatgagtgttgaacttgcatgtatatgtgtgcaccatgtgcatatagttct

SEQ ID NO: 2251 - DNA, 5008 bp, Mus musculus
ggtaacagagaagcggccgcggcggtagaggcggcagagacggtttctccatcttcccccctccccttccccccttagagtttccctccctccctccctccttcccagtctgggcacccaggcctgtgaccgcttcgtgggcgcaaaggaggttgccagtccgctcttgcgggcctgtgcccgcgccgttccggggcctccgtgctgggtgcgaggctcacgccgggagcgacgcacaggctgagtggctggagcttttgcgttcagttcggtggcattaagtacactcacgtccttgtgcagccttcgccaccatcctccttcagaactcattcatctctcacagttgaacctttgcacacatgaaacagtttgtagtgcatccctgagcatgagtgcagaatgaagcgacgtttggatgaccaggaatcaccagtgtatgcagcccagcagcgaaggattcctgggagcacagaggctttttctcaccagcaccgggtccttgccccggcccctcctgtgtatgaagcagtgtctgagaccatgcagtcagctacaggcattcagtactcagtggcacccaactaccaggtttcagctgtgccacaaagttctggcagtcatgggcccgccatagcagcagttcatagcagccatcatcacccaacagctgtccagcctcatggaggccaggtggtccagagccatgcccacccagcaccaccagttgcaccagtacagggacagcagcagtttcagaggctcaaggtggaagacgccctgtcctatcttgaccaggtgaaactgcagttcggtagtcagcctcaggtctacaatgatttccttgacatcatgaaggaatttaaatctcagagcattgatactccaggagtgattagccgagtgtcccagctatttaaaggccaccctgatctgatcatgggctttaacaccttcttgcctcctggctacaaaattgaggtgcagactaatgacatggtgaacgtgacaacacctggccaagttcatcagattcccacccatggcatccagccccagcctcagccaccacctcagcatccttcccagccttcatcccagtcagctcccactcctgctcagccagctcctcagcccacagctgccaaagtcagcaagccttcccaactacaagcacatactccagccagtcagcagactcccccactcccaccatatgcatccccacgttctccaccagtccagcctcacacaccagtgacaatctccttggggacagctccatctttgcaaaacaatcagcctgtggagtttaatcatgccatcaactatgttaataagatcaagaacagattccagggccaaccagacatctacaaagcattcttggagattttgcacacataccagaaagaacagcggaatgccaaggaagctggaggaaactacactccagctttgactgagcaagaggtgtatgcccaggtggctcgactcttcaaaaaccaggaagatttgttgtctgaatttggacagttcctgccagatgccaacagctcagtgcttttaagcaaaacaactgctgagaaggttgattctgtgagaaatgaccatggaggcactgtgaagaagccccaactgaataacaagccacagaggcccagtcagaatggctgccagatccgcaggcactctggaacaggagccacacctccagtgaagaaaaaacccaaactgatgagtctaaaagagtcttcaatggcagatgccagcaagcatggtgttggaacggaatcattattttttgataaggttcgaaaggctcttcggagtgcagaggcctatgaaaacttccttcgttgccttgttatctttaatcaggaggtgatctctcgggccgagcttgtacagctagtctctccttttctggggaaattccctgaattgtttaattggtttaaaaactttttgggctataaggagtctgtacatctggaaagctttccaaaggaacgagctacagaaggcattgccatggagatagactatgcctcttgtaaacgactgggctctagctaccgagccctaccgaaaagttaccagcagcccaagtgcacgggacggactcctctgtgtaaagaggttttaaatgatacctgggtttccttcccatcttggtctgaagactccacttttgttagttccaagaagactcagtatgaagaacatatttaccgttgtgaagatgaacgatttgagcttgatgtggttcttgagaccaatcttgcaacaatccgggttttagaagcaatacagaaaaaactttctcgcttgtctgctgaggaacaagccaaatttcgcttggataacacccttggaggcacgtccgaagtcatccatcgaaaagcactccagaggatatatgctgacaaagcagctgatatcatcgatggcctgaggaagaacccctccattgctgttccgattgtccttaaaaggttgaagatgaaagaagaagagtggcgagaagctcagagaggcttcaacaaggtctggcgagagcaaaatgagaagtactacttgaagtctctggatcaccaaggcatcaacttcaagcagaacgacactaaggtcttgaggtctaagagcttactcaatgagatcgagagcatctatgacgagaggcaagagcaggctacagaagagaacgctggtgtacctgttggcccgcacctctctcttgcctatgaagacaaacagatactagaagatgctgctgctctgattatccaccatgtgaagaggcaaacaggcattcagaaagaggacaaatacaaaatcaagcaaatcatgcaccatttcattcctgacctgctgtttgctcagagaggcgatctctcagatgtggaagaagaggaggaggaagaaatggatgtggatgaagcaacaggagcacctaagaagcacaatggtgttgggggcagcccccctaagtccaagttgctatttagtaacacagcagctcaaaagttaagagggatggatgaagtatataaccttttctatgtcaataacaattggtatatctttatgcgactgcatcaaattctctgcttgaggctgctacggatttgttcccaagctgaacggcaaattgaagaagaaaaccgagagagagaatgggaacgggaggtgctaggcataaagcgagacaagagtgatagtcctgccatacaactacgtctcaaggaacctatggatgttgatgtagaagattattacccagctttcctggacatggtgcggagcctgcttgatggcaacatagactcatcacagtatgaagattcattgagagagatgttcaccattcatgcctacattgcctttactatggacaaattaatccagagcatcgtcagacagctacagcacatcgtcagcgacgaggtctgtgtgcaggttactgatctttacttggcagaaaacaataacggagccacgggaggccagctcaacagtcagacttcaaggagccttctggagtcagcataccagcggaaggcagagcagcttatgtcagacgagaactgcttcaagctaatgttcattcaaagtcaaggtcaagttcagctgactgttgagctcctggacacagaagaggagaactcagatgaccccgtggaagcagagcgttggtcagactacgtggagcgatatatgagttctgatactacttctcctgaacttcgagaacatctggcacagaaaccagtatttctcccaaggaatttgcggcgtatccggaagtgtcaacgtggtcgagagcaacaggaaaaagaagggaaagaaggaaacagcaagaagaccatggaaaatgtagagagcctggataagctggagtgtaggttcaagctgaactcctataagatggtatatgtgatcaaatcggaggactacatgtaccggagaactgctctactcagagctcatcagtcccatgagcgtgtaagcaagcgtctgcatcagcggttccaggcctgggtggataaatggaccaaggagcatgtgcctcgggaaatggcagcagagaccagcaaatggctcatgggtgaggggctcgagggcctggtaccctgcaccaccacctgtgatacagagactctgcactttgtgagcattaacaaatatcgtgtcaaatacggcacagtattcaaagccccttaactgcagagccagagcaggtagctcagaggtgtgtgtgtgtgtatgtgtgtgaatatgtgtgtgtatgtgtgtgtgtgggggcatgtgtactcatgtacactgaagaatcaaggaagatgcctttcaagccaccagtgcaaccaggcaccagcaggatacacgaaaggaatgcgaatggatggataccttaggaagctggaactggcacttttcccacgggtactacccagacccaacagggaatgaagtccatgcaagcacagagacaggcagcttgcttgcacacaccagcagagctcaactacaacttcctatgacctgagcaaccagatgctgtccccatttggatggatggatggaggtgcatcttgtcactgctccttttcccacctccaaaaaagagaggggaggggagccaggatttgatgataccctgacttgagcacagctaagatctctgttagattttatctgagacctgtttggctttggaattaataacttatggatttggtttctgagtccttgaagttcaccttcttccctcttctggttctcggcctcaacaaattccagtcagtcctcctttttagctcccatgggactgttttgtacctgcttctttactagtctgccctagtgccatccaccagcttctctctcacacgcacacatgcacacacatgcacacacacacaattttaacttggtttttcttttttgtaaataatgtacatactgtcaattttttattaaagaaatatgctttgatgtgctagca

SEQ ID NO: 2252 - protein, 1278 aa, Mus musculus
CIPEHECRMKRRLDDQESPVYAAQQRRIPGSTEAFSHQHRVLAPAPPVYEAVSETMQSATGIQYSVAPNYQVSAVPQSSGSHGPAIAAVHSSHHHPTAVQPHGGQVVQSHAHPAPPVAPVQGQQQFQRLKVEDALSYLDQVKLQFGSQPQVYNDFLDIMKEFKSQSIDTPGVISRVSQLFKGHPDLIMGFNTFLPPGYKIEVQTNDMVNVTTPGQVHQIPTHGIQPQPQPPPQHPSQPSSQSAPTPAQPAPQPTAAKVSKPSQLQAHTPASQQTPPLPPYDRSPPVQPHTPVTISLGTAPSLQNNQPVEFNHAINYVNKIKNRFQGQPDIYKAFLEILHTYQKEQRNAKEAGGNYTPALTEQEVYAQVARLFKNQEDLLSEFGQFLPDANSSVLLSKTTAEKVDSVRNDHGGTVKKPQLNNKPQRPSQNGCQIRRHSGTGATPPVKKKPKLMSLKESSMADASKHGVGTESLFFDKVRKALRSAEAYENFLRCLVIFNQEVISRAELVQLVSPFLGKFPELFNWFKNFLGYKESVHLESFPKERATEGIAMEIDYASCKRLGSSYRALPKSYQQPKCTGRTPLCKEVLNDTWVSFPSWSEDSTFVSSKKTQYEEHIYRCEDERFELDVVLETNLATIRVLEAIQKKLSRLSAEEQAKFRLDNTLGGTSEVIHRKALQRIYADKAADIIDGLRKNPSIAVPIVLKRLKMKEEEWREAQRGFNKVWREQNEKYYLKSLDHQGINFKQNDTKVLRSKSLLNEIESIYDERQEQATEENAGVPVGPHLSLAYEDKQIDAAALIIHHVKRQTGIQKEDKYKIKQIMHHFIPDLLFAQRGDLSDVEEEEEEEMDVDEATGAPKKHNGVGGSPPKSKLLFSNTAAQKLRGMDEVYNLFYVNNNWYIFMRLHQILCLRLLRICSQAERQIEEENREREWEREVLGIKRDKSDSPAIQLRLKEPMDVDVEDYYPAFLDMVRSLLDGNIDSSQYEDSLREMFTIHAYIAFTMDKLIQSIVRQLQHIVSDEVCVQVTDLYLAENNNGATGGQLNSQTSRSLLESAYQRKAEQLMSDENCFKLMFIQSQGQVQLTVELLDTEEENSDDPVEAERWSDYVERYMSSDTTSPELREHLAQKPVFLPRNLRRIRKCQRGREQQEKEGKEGNSKKTMENVESLDKLECRFKLNSYKMVYVIKSEDYMYRRTALLRAHQSHERVSKRLHQRFQAWVDKWTKEHVPREMAAETSKWLMGEGLEGLVPCTTTCDTETLHFVSINKYRVKYGTVFKAP

SEQ ID NO: 2253 - DNA, 101055 bp, Homo sapiens
  misc_feature (1)...(101055): n = A, C, G or T/U
tatttttagtagagacggggtttcactgtgttagccaggatagtcttgatctgacttcgtgatccaaagtgttgggattacaggcgtgagccaccacgcccggcaggcatacttaattttaaatctcacatcttcccaccgaagtaggtattctgattcttagattacagataaagaaactgaaaagataaatgatttgccaaaatcatcttgccttgaacctagaagatgctttgggttgtgggtccctggggagccagcctcatatcctccttacctggatattactgagagtcttagccctcagagcttgtgtggatagggtgctggcactgatatccttggcagagtcactgaagtgcaggccctaaatgtctctcagtcaccacctaccataagtgccctaaagaactttgaatgagtcctttttgtgaaagagagagggtgtatgtgagacacctgtgagattgagggtgtcaggaggtgtgatagatttgagtttatgtgttgcgagtttaggtcttctgtgtatgtatgtatgtatgtgcatcagacaaatgttgcttttctggataattttctggaaacggccagaaatcatttagaattgtctgaggataaactgatctttaagttagggaggtgaggagtgtggagcaacaggggagtcaggctgtttttctccaggccccaacctgggtcactggccggagtgcacaaagacagcgtgtgggagtggaggcaaagcttagactttggacccagacttcccttaagctatttgacttgagcaagtcactctactgctgttagcctcagtttgctcatctataactaaggataataatccctaactcacaaactctacaagaatttgttgttgttgttgtttgagacagggtcttgctctgtctcccaggctcaagtgcagcggtgtgattacagctaacagcagtctcaacctcccaggctcaggtgaccttcctgcctcagcctcttgagtagctgggaccacagggacatgccaccatgcccaactaaatttgtttttattttttgtagagacagtctcactgtgttgcccaggctggtctatgagacttttcacataaaacgggcctccaggaatcagaacctgacctaccagtgtgatttctcctaggagggcccttacccaaatccacttaattttattttaattattatcattattattatttttacctataccagttggttcacaaagtccacttagttttgtcttcactgatagggtagtcaggggagtagcatggatgtaatccctcagtgcagctggcagctggagggacaatgtcaccaaatcaagcgttctctttcccaaagaatgtgggacttgccgtgctgtccaggtgtcaacatactgagtgagaaaccatcactggaccccttccaaagggccccctgtatctgactgcagtgagctctggggactcagaggtgcatcgaagtgtctgtcctcaagaaactcagtctgccaagtgttcaggaggaggtctccaccagggtggcacacataggaccatgggcagtgtcagcaaagcctggttctctgagtggaggtaactgttgcagttgcaaatcctccatgagtaactgcatccacagcacaacacgtgctgcctagtatcactgtcaaatgctgggtctttggcttccacagcagctcagaaccttaccaggtgataaagcacactttatcatcacatttgatcctcataacagggcaaggattgctatgttatcctcttatataggagaggaagctgatccacagataagaagggactaagtgggaaccaggggactcaacttccagactagttctttctgctccaccaatctgcctcatctcactttgacacagtatctgttatgccttcagctagagccccttaagaaattaagaaatagagcaggaatttgagatggggatccagccatcaggggattggttctttttttttttttttttctttgagatggagtttcactcttccccacccaggctggagtgagatggcatgatctcggctcattgcaacttctgcctcccgggttcaagtgattctcctgcctcagcctcctgagtagctgggattataggcgcccactaccacgcccagctaatttttctatttttagtagagacggggttttgccatgttagccaggctggtcttggactcctgacctcaggtgatccaaccacctgggcctcccaaagtactaggattacaggtgtgaggcactgcacccgactgggttctttttgagactctgtctcaaaaaaaactctcaaagagtttcactcttctgcccaggctggagtgaagtggcgcgatctaggctcactgcaacctccgcctcccaggttcaaacaattctcctgcctcagcctcccaactagctgggactgtaggcatgttgccaccatggacagctaatttttttttttttttgagacaaagttttgctcttgtcacccaggctggagtgcagtgatgtgatctcggttcactgcaacctccacctcccaggatcaagcgattctcctgcctcagcctcccgagtagctcggactgtaggcacatgcaaccacacacagctaattttttttttttgagatggagtttcactcttatcgcccaggctggagtgcagtggtgcaatctcagctcactacaacctccacctcctgggttcaagtgattctcctgcctcagcctcccgagtagctgggattacaggtgcccaccaccatgccctgctaatttttttgtatttttagtagagatggggtttcttcatgttggccaggctagtctcgaactcctggcctcaggtgatccgccttcaggtgatcctgacctcaggtgattggcctcccaaagtcttgggattacaggcacgagccacagcgcccagcccacgcacagctaatttttaaatattttgtagagacagggtcttgctctgttgcccagctgggatctctgttctgaagaaaaacttggtcctcaccctagggaggatgaacctcaaactccatggctctgccagggtgggcctcctgctgaacacatagtccttatctcctggcctttccctctccatacttttcacccagtgattcaattgactgagctactgcctattttccagtctccagactccagttggggtgacccactgcccttccaaaatcagtagttcttcccacctaccctgtctcctcagtggtaagcttcccccacctggatcctatgtgaggtccttagagtctatctttttttcttttttctttttcttttttttttttttgagacggagtctgtctctgacgcccaggctggagtgcagtggcgtgatcttggctcactgcaagctccgcctcccaagttcacgctattctcctgcctcagcctcccaagtagctgggactacaggcgcccaccaccacgcctggctaattttttgtattttttagtagagacagggtttcactgtgttagccaggatggtcttgatctcctaaccttgtgatccgcccaccttggcctcccaaagtgctgggattacaggtgtgagccaccacgtccagccgagtctatctttctattccaatttccaaccccatttcacagggaaactgaggctcagagggaggaagagacttgcctaagactataacaccagttgctgaccatgctaagtgcagaactcagattacctaactagtagcctcaagctctatcaactcttcacacagcaggccacaggctacttctttccctctactacccacactgaatcactcacctactccccttgagtctttctcaaatacaggctctccttcaatattcttctcaccggctgggcgcggtggctcacgcctataatctcagcactttgggaggcagaggcgggtggatcacaaggtcaggagttggagaccaacctggccaacatagtgaaaccccatctgtactaaaaatacaaaaattagccgggtgtggtggcacacgcctgtagcctgtagtcccagctactcgggaggctgaggcgggagaatcgcttgaacctgggaggcggaggttgcagtcagccgagaccatgctattgcactccagcctgggtgagagagtgagactttgtctcaaaaaaaaataaaattcttttcacccactgtcactgttctggtcaatcctcctttcgtgtctcctgaattattgggaaagacttcccaataatttcctaactggcagcaggccctcattctgcccattggatgccaaggtccttcnnnnnnnnnnnnnnnnnnnnnnnnnnnnnnnnnnnnnnnnnnnnnnnnnnnnnnnnnnnnnnnnnnnnnnnnnnnnnnnnnnnnnnaccccaccttatccacattaacttcctttcctcaatgcctcaacaaacaggtttttttgtttgtttcacattgtgtgctctggctctaggctcagctctctggaatacagacatgtggggtggcttctgtcccctagaaactccttttggttagaagttatgataaataaagcaaatgaggcaaggaaggatctgagtcaaagctttgacttgagggctgctgaaggtggggaaagctttcggattgggtggctttgatagagaaaagaagccttctctttccccagctattccttccacaaggaggcacttctgcagtctccaaacgcagtattacaacagcctctgggcctccccttgctgcctataggcacttctctctcagtgcatcgtcagaacccatctttctgccagggtgccaaacatcttacactatagttctgggtctgtgggccttgtgaccgtgctgcctgcacattctgctgcgcacgtccaagaattttactcaactaaaagtcttaaactgtttgttccatctccccacccctccttttttattactacagccacatatgaaggtccttttttgcattcacccctttgtgtcctttgatgaaaatgacctgcccctccaatttgctggatgaaatctttaagacccaacttgaatgccacctccttcatgaaacctttcccaattctccttcagcgaaaaggaatctctcttctctgagctcctatttacatacacattcctattttcatacacattcctgccttgccttagttccttacgtagaatctcctcggctgaatctggagcccttggaggggtagagtaagcatgtcatccagtctgtaattgcacccagcagcaggtacgtatgaatgtctgcctcacccacagtaggtgctcaggcaagtgcctgttgcccgcggacgcagggcttcctgtttgcatcactcatttttagtcgcctaacagagcggaccgaacacggttaggtcacacagccacaggagtctgcccactccagccagtgactagggtgctcctacccttctctcctacctagttccaaatgggttgtgtgtgtgaaggaagttggggccgggtagctccgctggctcgtcctccgcgtccacccagcggatctccgagtcccaggcggcctccccccagtccgaggacctcaagaaactcgagtcggcggcgagggagctatatgggcctctaccacggatgcgtctcccactcgcgtttagtttaattaattaatttatattttttggaaggagggggcgttcaatgaaggggaagaggcggggcgaagggcggaggcgggcccagggtgactgacgtgagcgccggggagccaatagcccgtggggggcgttcccccccattcaggactcctcgcctggctcggaaggtatgttaaacagctgcttttaatttggtccccccaatctcaggcgtttggggggctagtccgccggccgctcggtctggccggcccgacgtggtgtgggccctgcgggccctgggaccgagctgaggggaggctcggagttccgcggccgaggtaggcgagggacaggccaggaaggagagctcttggcgccgcccgctcgccagtgtgtgtgtttcccagcctggccggagccgtgggagaggggtgggcctggcctggggtcgtccctgcgccggccgtgtagcctagtttatctcaccgagcagtcggtttcggtaggttttggcggcggactggagaaggggcgggcaggagacccccgactcctgttgtgccgtttttttaaaaagaaaaatactggaaagaaaagggggattccgcacaccgactagaaccgggccggagctgcggcgtgcgggctcggcagggggcggcggctcgagcatggtcggcggggcccactgagctcgcggcgctcggagttgctcgagagctggagttagcgagcgagccggggcccgcggcttccctggctacccacgctggacaagggcggcagccgccccgagggttttgtttttgcccgcaaacttggagggggcggtgggcgcgctccggagaggcgcgggcactgtgggcccgcggttgttatggactctgggggcgggggcaacaccggacttgcgggaggggcggccgggggcgggagaggccaccggaaagagcccctgcgcctcgccgctagccctgcgagctgccgggtctccaaactccctggccgtggcggtcgagtcagcattcggtgccggaacccgtcaggccgcgacccagcaaggagctcgcatcggtggtgcggaaaacccccagaaactcggcggcttcgtccgcggccccggctgatccccttgcaaacatggagctgcctgcttccccgcccaccccaaggcggcggcggcgactgctgctctcttcccctcccccgaccgtgccgccgccgggctcccccttcccgcgaggtgctgctgcggaccgctcggcgcggatggggcgggggcgggggnnnnnnnnnnnnnnnnnnnnnnnnnnnnnnnnnnnnnnnnnnnnnnnnnnnnnnnnnnnnnnnnnnnnnnnnnnnnnnnnnnnnnnnnnnnnnnnnnnnnnnnnnnnnnnnnnnnnnnnnnnnnnnnnnnnnnggcggggaggggcgcggggggcgcgcctgtcagccgggatggcggccgcgggcgggtaggcggggcgccggcgggaaccgtcccggccgggcggggcgacgccgggagaggcggcgcaggggcccagtccaccgagcgccgggcggcccttgcctgcactcctcggcccagactgtttactatctactccgccggcggcttgtgcaacccgcctgcaggggagctgaggggcggacccctttcctctctcccacccacctccggctctcccggaggccccgccttctcttgtcttccactggctaggcgagactccctttttttctccttcttggatgtggattggatgacattctcccgagctccgcctatcgggaggccgggctggagtttaagttgctaggattttttttttcgcggagggaggagggacggttcttgcggatgacgtgaggcgcaaggtcccgcccccgcctctgattggtggggcgggtagcccggcctcctccggcggagagagctgggaggggaagtccacccttgctccccgcctccctccgctcttgagcgcgctccgcacatgtgtgaggcccgcctagctccttcgaactgccctcccgcccggaagtcctaggctcggcgcccttggcgaggggggcggggagagccgagaagccacacaaaggttccaccgaggctcgagacctagtagccttcggggtgaagccaggggattacagtgcggagtggatttcgggagcgaaactccggaggttctgctgggtttgagatctgcctttcggggccggggccaagtactaaagttctaaccctgtcgcttggctatttccgtgccccttgacttccctgagcttaagctcgagaactctgcagacgctgcaagtgtctgttctttcctaggcatggcagcggctgtccttagttggctgtatctgagactctgacaacctagtgccctggcctggggcccttaggcgagatcttagcgcaggtggtaccctgtgttcacgggaagtcgtgggcggcctaatgctggcttgggttctgagtagttcttgataccatggtgggaatgccctgtggtactcagtctagtggtggaaggcggcgcaaagttaaaagtagccgtgggtcagttctgctggagtgccgcttcctcctaacctccgagcagtttggccctggggtcgcttcgttggtctgacttatttttagagctctgtcctggggcagggcttggctactggcgaggctgctcccacctgtcggctacccttggagttcacaattcgctgctgtggtttcgcggctcgaagccatcgctggagtcaggcccacctgctgccagagctcgttcctggccgtttccgctggattgcagagggaggacagtgttggacctaggcgtgggttccctgggcgtgtcccttggggtcttagctctctgggaggagggttctacttattcgggagagcggtaacaacgtaatcccgtcacctctcctggcgctgagagagcgccccccaaagtaagatcagcgtcaggcccacgccctatttggtgaataaataaaagcaaactaggaattgaaagcactttgtctcactgtgtgttcgaggcactgttacctacacagagagggcacaggaactgctattaacactcccggccaaggagaaggtgaacagccgttatcttatgtccccaactacggaaattttatccattctctgagtgtggcatgtccccaatgttaatttatgccgtggcctgttttggtgttttcctctcctttctcagttctgaggatgcctccagatccacccgggagatcgtgagtaccttgtgcctcacgctccgccttccggaggcttgccagggcggtggctgttagagcccgcctctcttttggttatctccgccctcttaggactgcatattcagctctagggagtttacttctccgcctaggtctccagaccttagttctgtactctacttggctgaaaggagttgccagctgctccggatatttgtgtttacaaggacgcagtgtgtagaatgtaaactgtaaagataactggacggaaggatgagttctcattctctcattttttttgtgagggagtcctccatggtgggctgcctttccttcaaatcctaggatgtggagtctccgctgatgagctccgctccccctcctatctcgggccctggaactccgagcttcagtctctagtgtaaacattccacaaaaggactgctaaggttcagcctcctcgcgcagggtggaattagctccttcctagacgggcgccctggccaatggagggtcctaccagcgccaagatatccaatccgactcttggggcggggcctggcccggcagtgcggtaggcggagcctgtttcacttacagacattttaccccacatcggttacttaccttactggggcggtgggagagccaggggtagccttccaatgcgatgaccagcggaggcgggagccaacttgttaggcctgtggctgagacgctgcagggcgggttatgtggtgtcctccaatgagacaggaagagcttccctgcttcctccaatagtgttggggctcgggggtgggcttcagcagtccgtctccaataggcggggttgagttagggaagctccccgccaataggggcgtggagaaggagagcggctccccctcccctaccagtcgagggggaaggggcgggaaaatcataagacaggcctcggtggttggctgagtctttgacgggcgggtattgcgtcctgtattggaacgaagctgagtcttccctctgcggggcggggtcgggggagtgggcgggatttcccgggtaacagagaagcggccgcggcggtagaggcggcggagacggtttctccatcttcccccctccccttcccccctcggagtttccctccctccctccctccctccttcccagtctgggcaccggagcctgtgaccgcttcgttagtggagaggtagctggcagtccgcttcggcgggcctgtgccccgcgccgttctcggggcctccctgctgagctcgcggctcacgctgagagggacacgcagtgacgagcggccgaagcagctttgcggtgagagcacgctgggccgggggccgggcgggagcctggtggcgggtaacgccggactcgagggtgtgtatttttggnnnnnnnnnnnnnnnnnnnnnnnnnnnnnnnnnnnnnnnnnnnnnnnnnnnnnnnnnnnnnnnnnnnnnnnnnnnnnnnnnnnnnnnnnnnnnnnnnnnnnnnnnnnnnnnnnnnnnnnnnnnnnnnnnnnnnnnnnnnnnnnnnnnnnnnnnnnnnnnnnnnnnnnnnnnnnnnnnnnnnnnnnnnnnnnnnnnnnnnnnnnnnnnnnnnnnnnnnnnnnnnnnnnnnnnnnnnnnnnnnnnnnnnnnnnnnnnnnnnnnnnnnnnnnnnnnnnnnnnnnnnnnnnnnnnnnnnnnnnnnnnnnnnnnnnnnnnnnnnnnnnnnnnnnnnnnnnnnnnnnnnnnnnnnnnnnnnnnnnnnnnnnnnnnnnnnnnnnnnnnnnnnnnnnnnnnnnnnnnnnnnnnnnnnnnnnnnnnnnnnnnnnnnnnnnnnnnnnnnnnnnnnnnnnnnnnnnnnnnnnnnnnnnnnnnnnnnnnnnnnnnnnnnnnnnnnnnnnnnnnnnnnnnnnnnnnnnnnnnnnnnnnnnnnnnnnnnnnnnnnnnnnnnnnnnnnnnnnnnnnnnnnnnnnnnnnnnnnnnnnnnnnnnnnnnnnnnnnnnngatctgccccgccctatgtctccgtggggagggaggggcacccgccgactgggagctgtggaggtgtcaggacttactcttgtggctgggtcatgccttctgcctgggggcacaagggccctgtgctggagctgctttctccgctttgctccatgcagcgtgtctggcaccgtgcagccaggagagtgggagcatggtcacccccactcccctcttggttgtaactattggggcgaagtgcccaaggtcctcttgtaggagcgtgcgtggctggtgctggaaccctagatccgcggtggtgatggtaggggaggggcagggagtcatcagagactagaaatgtggcggagggaaaaccttccctggggttcccttgatgttcagttaccgtggctgtacggggcggggcttcctttgagccaatgggtggtgggtagtagacttggcgtctgtttcggtgcgttaggactttaaacgaagttagccttgaaaaggcagtggaagctcctcctctttacaaggctgagatttataacaggaaagtttggatttacattttaatctcaaaactggtctgtttataaagtagggtttgttttttttttttaagaactcagactttgaataaaatactccgatatctctgacagttgtatttttgaatgctttcattgtgcacatggttctgctatataaacttagtttcctggacgggcgcggtggctcatgcctgtaatcctagcactttgggaggccgaggcaggtggatcacttgaggtcaggagttcgagaccagccaggcttacatggcgaaaccctgtttctactaaaaatacaaaaaaaagctgggcgtggtggcaagcgcctgtaatcccagctactggggaggctgaggcaggagaatcacttgaacccgggaggcgagggtgcagtgagccgagatggtgccattgcactgtagcctgggcgacaggagcaaaactccgcctcaaaaaacaaccaaaaaaacttggtttcctaaagaatttgctatttaggtaactataggtgaaaagtacttttcttttttattttatgtacttatgttagaccatctagaccactttctatttatactctacatagtacagtgttgttgccctttttatttcagaggagggtggaattgtggatcagggtagccttctgtatgtgacttctgtagcgttgccctccagcctgtattggagagttgccttagggcatttcagatttagatagcagaaccacattagatgaggtttttgctttcacttgatacattatcttttcctattgagagaaattatttcaatgtttttcacatttttcatgagaaaaataaacatggaaccaatgtttatttatgcagtaatgtctaaatgagcctctggttaattatctgaagtgaaattctagatttgtgctttggttagtagggcctgagtggtaccctgtgctatatttatgtgaaaagggtaggtgggtcctaccttctctgctaaggaagttgcaaaagcaatagcattttagtttagcaaatgatggctgtaatagaattggtggggagacaaaaaatccaggtggttttttctgatgccataaactgagagagatagtggagaacgattgaccattgaggaaaatttgggctacatatatagttcccatgatttgcagtgctgtatactggggaacacagaagagtctataaggattcaagtaagaacctggttttgctgtattaggaacattttcataaatgcttcataatctccagataattattttatatactataattttgttcagagataaatagcttagaaagattggcacttcgtaattaagagggttttaataatttacatacagagaaagactttttttcttttttaaggaaggaggtgtgtagtaatttgacaagattcctggtgaagtataattctttttacatcttcagtgggagcagacaagacactggagagctgtgcatggcagatgttagtacctgggaattttaactggaattaagaggttatatccctggcattcagtagtttagcatagtgcttttcatggctttctctcttttctgggcaatccaccagccaagagtttgttaagctttactttctgtaggcctttaaaaaaataaatagtatatgctttttcaaaatacaccttcctcgccccttgaaaaataaaagctgatatttattgagcacttactgtgtcacagatactgtgttaggcactagacttttttttttttttgagatggagtcctgctctgtctcccaggctggagtgcagtggtgcaatctcagctcactgcaacttccgcctcccgggttctagcgattgtcctgcctcagcctccacgaagaagaagctggggcgccaccacacgcctggctaagttttgtacttttggtagaggcagggtttcaccatgttgatcaggttggtcgcagactcctgacctcgtgatccgcccgcctcagcctcccaaagtactgggattacaggcatgatccactgcacccggccgcataatgtctttttttctcatgtctttttttttttttttttagacgaagtctcgctctgtcaccaggctggagtgcagtggcatgatcacagctcactgcagtgttgatcttctggacttaagcgaccctcctaccttagcctcccatgtagctgggactacaggtgtgtgccaccacgcacctggctaattttttttatatttttatagaggtgaagtcctgctgtgttgcccaggctggtctcgaactcctgggctcaagaggtccttctgcctcagcctctcaaaagtgctaggattaagacgtgagtcaccgtgcccggtcatgggtggcaatttctacctgatgtatttcttatttgccccttttgcttttgttttccctacccactttttgtcttgtatgcttgtatgttacccatatttctcagcatgacagtggacccttcatgagtcttcttggtgtcctccagggctaggcttgctgacatatgggctattggaggatatgcaggtccacatcctttatttgcagttctgaaatgcaagagtttttgttttttggtaagtctagttccacaactagttttggggtacagcctgacctgggctatcctgcatgatgcagaaatgtgactgcttgattatggggagctactcagccctagctgggagagagagatgatacagtatatgtaccatattacctttctaaaatccaaacaatgctgataactctaacggggatctctccctctaccatagactaatatgtttagtggcccactcaaggtctccactcgatgtctcctcttggataactaagagacattgttgactcttctgtgtctttttcatatgtggtccatcagtaaattttactgctttatattcaaaatactatccagaattagaccacttaggatctgcatctccactgccctagtcagtgcctgtgcatctctagcttggattctattctccttgttttgttactgcggctcttaaatgtgttctcaacatagcaacccaagtgattcttttgaaacctaagtcataccgtgtcacttctctgcttaaaaccatccagtggctttccatttcagtctgagtattaaacctgagtccttatttagatatgtctgtaatgagctgggcgcggtggcccatgcctgtaataccagcactttgggaggctgaggcaggcggatcacgaggtcaggagattgagaccatcctggctaacatggtctccactaaaaaaaatacaaaagagttagccgggcatggtggcacacgcacctgtagtcccagctactcgggaggttgaggcaggagaatggtgtgaacccgggaggtggagcttgcagtgagccaagatcgtgccactgcactctagcctgggcgacagagcgagactgtctcaaaagaaaaaaaaaaggatatgtctgtaatttcaccattttgggagctcaagtgggaggatcgtttgagtccaggagtttgagaccagcttgggcatcataacaagaccctgtctctataaaaaaattaaaaattagccaagcatgctggcgcgtgcctgtagtcccagttacttgagaggctgaggcaggaggattgcttgagctcaggagcttgaggctgcagtgagccatgactgtgccactgcaccccagccttgacgacaaaatgagaccctgtgtcaaaaaataaaaaaacacctgtaagaacaaatctgatgtaccctctgcctgccacccttatcctagtacctctctgactacatttctgactagtccttctttcgtttttcttcagctacccagccttcatgctgttttggaacatgtcaagcacatgtgagccctcacaaagacatgagggtctttgcggttgctgtcccctctgcctagaaggcttcctccactaatttctgcatgactagctccctcacttcctttactcagaagttaccttatcagtaggtattatctgaccattcttatctacaatttcaaaaactcttccttgccttttgttcttgatacctgtcactgcctactattctaaatattatactttgtctattgtgtcatctttcactaaaatataagcttcttgagggaagagatttttgtttaccgttgtatctccagctcctaaaacacctggtgcatagtatgtgctcagtagatattagagaatgtatacatgaatgaatgatttggtttccaccacagacaagacaaagcagtatgctgagcatggtagaggatacatagatggttaaagatgttatgtgcccatgtttgtgtgggagcagaagagctaatgtgataaaagcagtgtgagatgtgagtgacacttccacctgtcctttcaagaactatctcaagttctattctttgtaatgctctattttcttttctttctttcttttttttttttttttttcttttttttgagacaaggtctcactgtgttgcccaggctagagtgcagtggtactatctcggctcattgcacacacacacatacacacacccagcttcaagtgattctcctgcctcagcctcccgagcagctgggattacaggcatgcgccactacacccagctatttatttatttatttatttattttgagacggagttttgctctgtctcccaggctggagtgcagtggtgcaatctcggcttggcacaatctcagctcactgcaacctccacctcctgggttcaagtgattcttctgccttagcctcccgagtagctgggattacaggcacccaccaccatgcctggctaatttttttttttttttttttttttgagacagtgtctcgctctgtcgcccaggctggagtacagtagcgcgatctcagctcactgcaatctccccttcccaggttcaagcagttctcctgtctcagcctcctgagtagctgggatcacaggcgccaccaccatgcctggctaattttttgtatttttagtagagacagggttttaccacgttgaccagccttgtcttgaactcctggcctcaggcaatccacctgccttggcctcccgaagtgctgggattacaggcatgagccactgcacctggccttatagatattttgaaagattatatttcttatattaaatagagatagggtcttaccatgttgctcaggctggtcttcctggactcaagcaatccacctgcctcagacacccaaagtgctgagattacaggtgttagccaccatgcctggcctaatacttaatttttaaaaaactttttctttggaaataattttagacttcaaagagagttgcaaaaataatacaaataatagccctataatcttcacctagattccccaagtgcatcttttaaaaccacaatacagtgatcaaatcagaaaatcaacattgataacaattattaatacattttgaatttaactaaatttctgttcattttctacctacagtagtaagaaatgtctgggtaacatcagtgtcaccgaagtctgtattgcccagattggtctcaaactcctgggctcaagcagtctgcccacctcggcctcccaaagtgctgggattacaggcctgagccactgcacctggtctggactcaattttagtttttgagttttgctttttttttttaaagcagtactaactacttgtaaagatgtatatttcatgacttttatttattggaggtcttcaaaacagcaaagagaaaatttatttttatttttaattttatttttgagatgcggtcttgttccatccccaggctggagtgcagtagcgcgatcttggctcactgcaacctccgcctcctgggttcaactggttctcctgcctcaacctcccgagtagctgggattacaggtgtgtaccaccatacccagctaatttttgtatttttagtagaaatggggtttcaccatattggccaggctggcctcaaacttcttatctctcgaagtgctgcgattacaggcatgagtcaccatgcccagcctgaaaatttattttttttccaaaggaataaactcattttagctattaccacttgtacatcgaaacaatgttgtggagttttactgatcttatttttcctgtatattgaaatgttttggtatttcatcatcctaggaattatttcatcattactcatcaattctcaaatatgctaaagaggactaaaataatatgacaaagggagaattatagaattgcttaaaaggatatgcagtagtgaaataaatcattagttttacacttcagtttttagagatggggcctcgctttgttgcccaggccgaagggcagtggtatgatcatagctctctgcagcctcaaacttctgggctcaagtgatcatccctcctaagcatcctcggtagctgggactataggtgtgcaccgcagcccttcagttttcttattgcttttcccaaaacttacagcaactttttttttctttttggatacagggtctcactatgtcacccaggctggagtgcagtggcgcaatctcagttcactgcaaccttcgcctcccagactcaagcaatctcacctcagccctccaagtagctgggactacaggcatgtgccaccacacctggctaatttttgtattttttttgtagagagaacgtttcgccatgttgtctaggctagtctcgaactcctgggctcaaacaatccacccaccttagcctcccaaagtgctgggaattccaggcatgagccagcatgcccagcctacagcatctttcaagaaaagtataaaagaagttgggagataccatcttaaacattatgtaagatgttaacatttggagaatctaggtgaaggagtacatggtaatttttatactatttttcaacttttaagctttcattggacatatttaaaaatccatagtttttcatcttcctcctataatggcaaagagaagaaaactgactacagaagacatttcagaggaactagtagatgaatgctgtgtgacagtagtactctagactgttaggatgacggtaaagttatataaaccaagttgtaaaataagagtcttcagccaggcatggtggcgtgcacctgtaatcctagcatctcgggaggctgagatgggaggatcacttgagcccagtacttcaaaaccaggctgggcaacatagcaagattctgtctccacccatatacatatgtgactgtaccctagatgagtttagaatgtgattttttttttttttttttttttgagacagagttttgctcttattgcccaggctagagtgccatggcacaatctcggctcaccgcaacctccgcctcctgggttcaagggattctcctgccttagcctcccaagtagctgggattacaggcatgtaccaccatgcctggctaattttttgtatttttagtaaaagatggggtttctccatgttggtcaggctggtcttgaactcccaacctcaggtgatccacctgccttggcctcccaaagtgctgggattacagtcgtgagccaccatgcccagcggtgaatttttttttttttttttttttttttaaagatgggatctatctcactatgttgcccaggctggatttaaattcctgagctcaagctgttctcctgcttcagttcccccaagtaactggcactataggcatccagctagaatgtgattttctttttataagaatcagaactgggctgggtgcagtggcatatgcctgcaatcccaccttcttgggaggctgaggtgggaggatcgcttgagcccagacgttcgagaccagcctgggcaacatagtgagaccccatttctatttttaagaaatgaaaaaaaaaaacaatcaaaaccactgcactttgccaaaaagatgtatgatagtattctttcatctttcaagatatttgtacaccaaaacttagttgatgcagtttgtaagtggacaggtgccaaagttacgtatatgtataaagatggttagaaggaaaaattatgtaaaaatgaaaaaaaaaatcagttttttttttttttttttttttttttttttttttgagacagagtctcactcttgttacccaggctggagtgcagtggcatggtctttgctcactgcaacctctgcctcctgggttcaagcgattctcctgcctcagcctcccgagtagctgggactacgggtgcgtgccactgcacccggctaattttttgtagttttggtacagatggggtttcaccgttttagccaggatggtctcaatctcctgacctcgtgatccacccgcctcggcctctgagagtgctgggattagaggcaagagccacacgctcagcctggattgttcattctgattgacatttattagtctaaaaatgagaatgcttatgattatggagcaaagaagatgactgttctctccaacaaaattatgaagtgagttttcaaagtatttcatttgatgggcagaaagggaaaaaaagacccagaggtgataagctagaaccttactagagctgtacctgaaacctggaatcaaaatttacaaaatggaagccaagcgtggtggtgtgtacctgtttacagagtggaagccaagtgtagtggtatacaccagctactcgggaggctgaggccaggaggatcgcttgtggccaggagttcaagaccggcctgtgcaatgtagggagaccctgtctctaaaaaaaatttttttcttattagccactctgtagtcccagctacttaggaagctgaggtgggaggattgtttgagcccagcagtctgtaatgagctatgatcatgccactgtactctagcctgggcaatagagcaagaccctgttttttttttattttgttttttgtttttttgagacggagtctggctctgttgcccacgctggagtgtagtggcgagatctcggtcaacctccacctcccaagttcaagcaattctactgactcagcttcctgagtagctgggattataggcacacgccaccatgcccggctaatttttttgtatttttagtagagatggggtttcaccatgttggctaggctggtcttgagctcctcacctcacgtgatctacccgacttggcctcccaaagtactgagattacaggcgtgagccactgcacctggccaaccctgtttctttttcttgttcttttttttttttttttttttgagacagagtcttcgctctgtcacccaggctggagtgcagtggcgcgatctcagctcactgcaagctctgccttccaggttcacgccattctcctgcctcagcctcccgagcagctgggactacaggcgcctgccaccacgcctggctaattttttgtatttttggtaaagacggggcttcaccttgttagccaggatggtctcgatctcctgacctcgtaatccgcctgccttggccttccaaagtgctgggattacaggcatgagnnnnnnnnnnnnnnnnnnnnnnnnnnnnnnnnnnnnnnnnnnnnnnnnnnnnnnnnnnnnnnnnnnnnnnnnnnnnnnnnnnnnnnnnnnnnnnnnnnnnnnnnnnnnnnnnnnnnnnnnnnnnnnnnnnnnnnnnnnnnnnnnnnnnnnnnnnnnnnnnnnnnnnnnnnnnnnnnnnnnnnnnnnnnnnnnnnnnnnnnnnnnnnnnnnnnnnnnnnnnnnnnnnnnnnnnnnnnnnnnnnnnnnnnnnnnnnnnnnnnnnnnnnnnnnnnnnnnnnnnnnnnnnnnnnnnnnnnnnnnnnnnnnnnnnnnnnnnnnnnnnnnnnnnnnnnnnnnnnnnnnnnnnnnnnnnnnnnnnnnnnnnnnnnnnnnnnnnnnnnnnnnnnnnnnnnnnnnnnnnnnnnnnnnnnnnnnnnnnnnnnnnnnnnnnnnnnnnnnnnnnnnnnnnnnnnnnnnnnnnnnnnnnnnnnnnnnnnnnnnnnnnnnnnnnnnnnnnnnnnnnnnnnnnnnnnnnnnnnnnnnnnnnnnnnnnnnnnnnnnnnnnnnnnnnnnnnnnnnnnnnnnnnnnnnnnnnnnnnnnnnnnnnnnnnnnnnnnnnnnnnnnnnnnnnnnnnnnnnnnnnnnnnnnnnnnnnnnnnnnnnnnnnnnnnnnnnnnnnnnnnnnnnnnnnnnnnnnnnnnnnnnnnnnnnnnnnnnnnnnnnnnnnnnnnnnnnnnnnnnnnnnnnnnnnnnnnnnnnnnnnnnnnnnnnnnnnnnnnnnnnnnnnnnnnnnnnnnnnnnnnnnnnnnnnnnnnnnnnnnnnnnnnnnnnnnnnnnnnnnnnnnnnnnnnnnnnnnnnnnnnnnnnnnnnnnnnnnnnnnnnnnnnnnnnnnnnnnnnnnnnnnnnnnnnnnnnnnnnnnnnnnnnnnnnnnnnnnnnnnnnnnnnnnnnnnnnnnnnnnnnnnnnnnnnnnnnnnnnnnnnnnnnnnnnnnnnnnnnnnnnnnnnnnnnnnnnnnnnnnnnnnnnnnnnnnnnnnnnnnnnnnnnnnnnnnnnnnnnnnnnnnnnnnnnnnnnnnnnnnnnnnnnnnnnnnnnnnnnnnnnnnnnnnnnnnnnnnnnnnnnnnnnnnnnnnnnnnnnnnnnnnnnnnnnnnnnnnnnnnnnnnnnnnnnnnnnnnnnnnnnnnnnnnnnnnnnnnnnnnnnnnnnnnnnnnnnnnnnnnnnnnnnnnnnnnnnnnnnnnnnnnnnnnnnnnnnnnnnnnnnnnnnnnnnnnnnnnnnnnnnnnnnnnnnnnnnnnnnnnnnnncggagcttgcagtgagccaagatcacgccactgcgctccagcctgggtgacagagcaagactctgtctcaaaaaaaaaaaaaagatatgtgacagttggggttatgattaaacttaggtttctcagtcttcacacactgttgacattttgggccaaataatttgttgtgaggagactgtcgtgtgcattgtaggatgtttgacaacatccttttactctatctgtgagatatcagtagcattccatcttcccgagttgtgacaaccaaaaatgtcttccatcattactacatgtgcccttgggaggcagaatctcccctagttgaggaccactgcattagaagaatataaaaactgagttcaaaggaggcttggatattagatctaatggtgtcttttgagaagagctggttgttaatttttccaagcaataattctaatcaatatatgaaatctaaatagagtgcctttcattctgtaatagattctttcttagcagatttaaaaccagaggtggacttttggacaaattttgaattagactactcaaaattgcactgggttgaagtttacattgacttaatactgcgatggaagtttgcttttgaagagaaactttccattgtttcaagaatatgcatttaaaaataagcaaaaaagagtatgcatttatttattttattttttgttctaagagtatgcatttaaacaaactgaccaggatagacttttgtttttttgagacagggtcttattccatcacccatgctggagtgcagtggcataatcacagctcactgtagcctcaacctcccaggctcaaatgatcctcccacctcagcctcctaagcagcaaggactacaggtgctcactaccatgcccagctaatttttaataaaatttttttgtagagacggtgtctcactttgttgcccaggctcatctcaaactcctggcctcaagcaatcctcccaccacggcctcccaaagtgctaggattacaaatgtgagctgctacacccagcatcccacccgtttttttttgtttgttttgttttttgagacggagagccttgttctgtcaaccaggctggaatgcggtggcgcgatctcagctcactgcaccctccgcaccctgggttcaagcgattcttgtgtctcagcttcctgagtagctgggattacaggcacccacaaccacacccggctaatttgtttttcgtgctttagtaaagacagagtttcgccatgttggccaggctggttttgaactcctgacctcaagtgatccgcctgcctcagcctcccacagtgctaggattacaggtgtgaaccaccgcgcccagttttattataacacatggccaggtgacttttaggacctgtaggtgttttttttgtatgtgtgtatttgggatcttcctctgtcgctcaggctggagtgcagtggtgcaatcttgcttaatctaacctccacctcctggcctcaaatgatccttcctcctcagtcacccagagtgctggaattacaggtgcaagccactgtgcccaccaggtgacctttaaatgttctgctgccattatttagtcttctctccatagtttctatacgtcaaagtgctttttttttctttttataatgtcttcctagactagagttctgatagtactataaactccaaatttgaaacagatggagatcaaccatgttggctgaagcgggacttgacagtacttttgtggctgactttgtggttccatcgtttggctttctttatattctagaattacactgtacccctctgcaagcgtggttttacagtcttgtccaatgtttctactttagattgttcatattccaaggaggaagaatttaacctcttgctcttttagtcaggtatgtgaccttgaataagtcatttaatttgagtatcagtttccctcaaaaaaagaggggtctggctgggcgcagtggctcatgcctataatctcagcactttgggaggccaagacaggaggattgtttgaggccaggagttggagaccagcctgggcagcatatcgagaccctgtctctacaaaaaatacaaaagttagatatggtggcgctgcctatgtcccagctacttgggaggctgaggtgggaggattacttgagcccaggaggttggggatgcggtgagccgtgatagccctgctgcactccagcctggtggacataatggtatgctattgcaaaaaaaaaaaaaagggttctgggactgcctatctgacaggattgttgcgaggaggacatcagctgatagcagtcatacatggaagacttggctgttgtcggggaggaaatctctggctcagtgctggacttctaaccctccgcacagggccaggcatgtcttaagcacttgctaattatttgtgggatgaatgacttggcaaagattgtaaataactattgcctgcaagtctaaacttactattttaatttcatgctctatacccctgtgttctaattcatctctaattttcaagatgtagctgaatatttacctttatagagtcttcccaagtgtacctgtctgtatccctttcccaatttatagtacttattttttccactcaagagctggtttgtattgttggcttttcttcctgtttttttttttcctaatcctcagaacctgtggatgtttttttccaagactttatcaagaaaatttccaaatacacaacaaagttgatagaattttagtaaatataatgaacacccatatacacactacctagattttaccattatcatttttctactactaggtttaacatatgcctgtccatctatccatcgctccatcaatgaatctgattttttgatgtatttcaaaataaattgcagacattagtatacttcatctaagcacttgagcatgtttatcattatctagagtttaatattgtttatagcatttttcttttttgtccaggctcgagtgcagtagcgagatctcagctcacctcagcctctgtctcctggactcacatgatcctcccacgtcagcctcctaaatagctgggattacaggtacatgccaccatgcatggctaattttgtattttttgtagagatggagtctcgccatgttgcccaggctggtcttgaactcctgtgctcaagaggtccgcctgcctcggcctcccaaagtgctgggattacaggcactttgtgagccattgtgcctggctagcatgttttttctttgtctttttcttttttgttttttttgtttttttttttgagacagagtctcactctgttgcccaggccggagtgcagtgacgttatcactgctcactacaaccttgcagcctcaacttctgaggtcaagagatccttccacttcagtcactggagtagctagtaccatagttgtgcgccaccacttccagctaattgtttctttattttgtagagacagggtcatcccattgttgcccaggctggtctccagctcctgggctcaagccatccttgagcctcagcttcccaaagtgttgggattacaggcatgaatcactgtgcccaggcacatttttctttcaatgcaaattttacatacaatgaaatgtacaaatctttagtacattttgtatgtgtatatatacatacatgagatcatgctgtatgtattctatagcttactgttttcttcttctttttttttttttttttgagacgtagtttcactcttgttgcccaggctggagtgcagtggcgccatcttggctcacctcaacctctacctcctgggttcgagtgattctcctgcctcagcctcctgagtaactgggattacaggcatgcgccaccacgcccagctaatatttgtgtttttagtagagacagggtttctccatgttggtcaggttggtctcgaactcccaaactcaggtgatccacccgcctcggcctcccagagtgctgggattataagcgtaagccactgcatccggcctagcctgctgttttcacttaatatgtcttagagttcattctttgtacttgtggataaaccctgatctttctgattcctacatagttttccataatatgcatgatcacatttatttagctgatagatatttagattttcatattttgctgcaataaatatactcagcagatgtgtaggatacaggcctgaaagtggaattgatagtttcagtattccaaaatctagtatgttttagagttcatttcttatactcgtggataaactttgatctgattcttacatagttttccataatatgcatgggatgggtatgcacatttaaaattttaataaatacctacaagttgccagctaaataggctgtaccaattaaagcctcctccatcagtgtttccctgtatccttacccacactgtcatcttttttttttttaaattgctttggagtaaattacttttttttttcttgaggcggagttttgctcttgttgcccaggctggagtgcagtggcgcgatctcggctcactgcagcctctgcctcccaggttcaagcgattttcctgcctcagcctctcgagtagctgggattacaggcatgcaccaccatgcccggctaattttgtgtttttagtagagacagagtttctccatgttgatcaggctggtctcaaactcccgacgtcaggtgatccactcgcctcggcgaaccaaagtgttaggattgcaagtgtgagccacggcgcctgaccttttattttttttttttttgagacagttccactctattgcccaggctggagtgcagtggcgcgatttcggctcactgcaacctccacctcccaggttcaagtgattctcgtgcctcagcctcctgagtagctgggattacaggcgcccacaaccacacccggctaatttttgtatttttagtagagggagggtttcaccatgttggccggtctggtcttgaactcctgacctcaagtgatccgcctgcctcggcctcccaaagcgctgggattacaggcatgagccaccgcgcccggcctactttacacgttttttattactagtgaggctatatatggttttagagggcaagggctgaaatcatctaccaacttcatatctactcactgaacatttgcttttaatgaatgaatgctactaaagcatttctgctttattaggtttaggctgaagaaggatgagttagctaagtgtgtgaaaggttaaaaaaagctgaacttgctccctgcatgtgtgccttaaataagtaaagggattcttccttcacttcttctcttnnnnnnnnnnnnnnnnnnnnnnnnnnnnnnnnnnnnnnnnnnnnnnnnnnnnnnnnnnnnnnnnnnnnnnnnnnnnnnnnnnnnnnnnnnnnnnnnnnnnnnnnnnnnnnnnnnnnnnnnnnnnnnnnnnnnnnnnnnnnnnnnnnnnnnnnnnnnnnnnnnnnnnnnnnnnnnnnnnnnnnnnnnnnnnnnnnnnnnnnnnnnnnnnnnnnnnnnnnnnnnnnnnnnnnnnnnnnnnnnnnnnnnnnnnnnnnnnnnngcctgaaaccaggaggtatgattagagcggaagcaatttatttgagagagagttaggaatagaactttgagtggtaattgtttgtttgtttgtttgttgttgttgtttttgagatggagtcttgctctgtcgcccaggctggagtgcagtggcatgatctcggctcactgcaagctctgcctcccggtccacgccattctcctgcctcagcctcccgagtagctaggactacaggtgcccgccactacgcctggctaattttttgtatttttagtagagacggggtttcaccatgttagccaggatggtctcgatctcctgatctcgtgagccaccacgcccggcctatgagtggtaattgttaaaggaataaagtatggttcagagaaagttcagcctctgtagtgttgtagaggtggtatggaaagcaaactctggaggtggatgaagttaagtaccatatgaaatcccaatcacttaataaaagaaacgatattttaacagccaaaagatagagtatgatatcagaataaaccatagtactgtaatacttaatgtatgaaaagctcactacaatcttctttttccttatagactggttcataaaccagcatttggaaatcactaatgtaggctgatcccctccttttgcccctgtttgaaaacagggccaaaattagaaagcttcatggtagatagagtttggagtagaatccagttcttttttgtttgtttttattttttgccctcaaacattctcccatccaacagaatccagttcttaaaaggtactctagtgttttttctatagtcgtgccgtgctcttcacatctgattttggcttattatttataaagtttttttttgttgttgttattttttgagacagtcgcgctgtcccccagcctggggtgcagtggtgcgaatttgctcactgcaacctccgcctcccaggttcaagcgattctcccgtctcagcgtcccaagtagctgggattacagatgcgtgccatcatgcccagctaattttgtatttttagtagagactgggtttcaccatgttggcctggctggtctcgaactcctgacttcaggtgatccacccacctcggccttccaaagtgctgggattacgggtgtgagccactgtgaccagcctatgaagtttttgttttttaaacccagtgctgccctatcataacatttctataattttttttttttttttttttttgagacagagtctcagtctgttgcccaggctggagtgcagtggtgggacctcccctcatgcaacctctgcctcctggattctagcgattctcatgcctcagcctcccaagtagcaggttttacaggtgtgcgccatcacacctggctaatttttgtatttttactggagacagggtttcaccatgttggccaggctggtcccaaactcccgaccttaggtgatctgcctgcctcagcctcccaaagtgctgggattacaggtgtgagccactgcatccggccaataaagtattgacttcatttttggttacagaggttaatctccgatgagttaagcatcagttttaaaccaacagaacccaagaccaaaccactgaaagtcatgaacgtatataagaaatagctaaaaagacattttactctacctgtgattagactcagttcctcatcccaaaacacgctgaggtttagtgttcgtagttgattagtggcaaataacatgcataaatctatatactcaacctcttaatatgtctaaaaggtttttgaatactaagctaaacatgctatttcatgctagaaaaacataggaaagcataactagctaagacattttaaattatttgtcctcagcagctgtcagaaacgttctcaactccatttaactgagttccacatattatcacacacaaagctgagagacttagtctgaagttatataggccacagagagcatatttgtggcttgagtttacaaatagataaaagtagccagcttgcaaattaatgggttgtgctgctgtgtcagggtcccacttaggtatgtgaaatgtgagaaaaacctgagacaggatttcagagctaaggattagagtggcaggcagattgaggactatagtgaggacaaagaaaaggtgaaacagccatggagagtccttgtaaagactactttcccttcagggcttgtgtgctcccagaggataaagaaaagatcttgggtagacttatgaattaggtaaagattttttttttttttaacttaaccgtatttcagatgagggggtggcttgccaaatctcccactattactgtaaattttatcttctttccatagcagtggtatcttatttaagagatttttttgggactggaaaagtggtggggccttttttctttggatggctgattcattctttctcactgatggtgtgttatgcttgtgttagtgatactgatatggaaaagctctgaagacccaagtagattactgggccaagtagattactgtgtcctgcaggaatgaaattgtctcccacggaggtattattaagctaagagaatctcttcttataactgttaaaaccagaagaaaatttaggagtgatctgttccaacttttcttattttatagttggagaaactgaaattcacatagaatgaggaacttgttgaagttacgtagcatcttaaattggcaagtctagaatctttgtcttcccattcctggcacggtattctttccatgataccattataattgttgaaacaaattttaaattagaccacaattatagtagtaggttttgagaggatttaagaagaagcacttgaggccgggcgcggtggctcacgcctgtaatcccagcactttgggaggctgaggcggatggatcacaaggtcaggagatcgagaccatcctggctaacacggtgaaaccccgtctctactaagaatgcaaaaaaagtagccgggtgtggtggcgggtgcctgtagtcccagctactcgggaggctgaggcaggagaatggcgtgaacccgggaggtggatcttgcagtgagccgagatggcaccactgcactcagcctgggcaacagagtgagactccgtctcaaaaaaaaaaagaagaagcacttgaatatttttgcagcatgtagatatgtaattaatattaggagtgatagcatttgaggagaaaactagagaataaagggaaacaaggttgtgtttatatttttaaattggagcgtatttttcaacttcataataccaaattaattaaaattatgttatttaaatatttgtctttttcagttataacttgttcactgtgttggggggtggtatgcccacatgcacttaaacttcatcactaagatgaaatagatgatcagttctgggagtcaagcttttactaaacttgggtgactggtcctaagtggcgtacatcatactggagtgagaattgacttgcatgctattgcttttggtttctgcaggttttgtagtgcatccctgagcatgagcacagaatgaaccggcgtttggatgaccaggagtcaccggtgtatgcagcccagcagcgtcggatccctggcagcacagaggcttttcctcaccagcaccgggtgcttgcccctgcccctcctgtgtatgaagcagtgtctgagaccatgcagtcagctacgggaattcagtactctgtaacacccagctaccaggtaagctggagccaaccaagggactagaatgagggaagagaaatagtggttttaggcaattataaaactttttttaatactgtgttagatattaaaaattgttgagtatgtgtaaggtaaaaaaaaaaataactgtgtactcaccatacaagtttttaaaaaaagaatgttgtcatgacctttgaagttccctgcgtatcccactctgctcccttcttttccctcccttcagaggtagccactgatctaaactttgtatttatcattcccttgactttatttacttaaaaaaactaacataattgtttagtttcggtatttttgaacttttatataaatggaaacattttcttctttgactcactttgttttaaaaaccccatatttttatagatcgctgtaattccaccattttcactgtagtgtaaattacatgcatatactcaatttatttgtcaattctactgttggactattgggctgtttccaggtttttgcttttacaaaggtgctgctgtgaacattgtgatattgtcttagtgcactcagtggcaattcatgacaaaataagaagcttgtgccagaatttaaatcaacgcacttattaagacagttttgctatttatttttaaaaaagacagctgaattaaacatcattgtagtgaaatatggctgactcttggacagtgtgggggttgaggcactgacttccccccatgcagtcaaaaatacatgtataacttttttcctttttctttttttaggagatagtgtcttgctctgtggcccctgttggggtgtagtggtgcgatcatgactcactgcagcctcaaactcttgggctcaagcagtcctcccgtgccctagcctccctagtagctaggactacaggtgcacaccaccatgcctggctaatttttatgatttttgtagagatgaggtgttgctgtgttgctcaggctggtcctaaactcttggcccaaagctatcctccccccgccagcctcccaaagagctgggattacaagtctgagccactgcgtctggccaatgtataatttttgactcccctaaaacttaaatacaaatagcctattgtccagaagctttaccgataacataaatggttgattagcatgtattttgtatatttgtcatatactatattcttaaaataatctagaagaaacaaaatactaagaaaatcataaggaagagaaaatatatctaccatttattaagtggaagtggatcatcataaaggtcttcatccttgtcttcacattgaggaggctgaggaggagggagaaagaagatgaagggttagtctggccatctcagggttggcagaggtgggagaaaatccatgtataagtggacttgtgttgttgctgagtgcagtggctcgcacccataatcccaacagttggcgaagttggaagcatgaggattgcctgagcccaggagtttgagatcagcctgggcaacatagcaagccccgtctctcctaaaaataaagattagcagggcgtaatggtgcacacttgtgttcctagctacttgggaggctgaggtgagaggatcatttgagcctgggaggttgaggctccagtgaatatgcttccgcacccagcgtgggtgacagagtgtgaacttgtctcaaaaagaaagaattaattaattaatttgaaaaaataaataaaaaattagccaggcatagtggtgtgcatctgtagtcctagctacccgggagactgaggtgagaggattgctcaagcccaggaagtcaaggctgcagtgagctgtgatcaagcaactgtacttcagactggacaacagtgcaagaccctgtctccttaaaaacaaaacaaaaacccgtgttattcaagggtctaccatcgttggtttacattgtggtgcaaactccttaacctgttggaaaccagtcagcaggtttgaggacatacaagagtttgtcaagtacctatgaaagggattgctgtgtcacagggtatatgcatctttagcaagttcccccaagcattgtatattcctgttctatgtcctgaccaacactgatcattcatctgttactctgttttgtagaagtgaagaaatttggtttttgcccttttttattatgaaagtaatgtatcactttggtttttttattttttattttattcatttatttatttatttatttatttattttgagatggagtttcgctcttatcacccaggctggagtgcagtggtgcgatctcggcccactgcaacctctgcctcccgggctcaagtgattctcctgcctcagcctcccgagtagctgggattacgtgcacctgctgccatgcctggctaattttttgtgtttttagtagagatggggtttcgccatgtgggccagactggtctcgaactcctgacctcaggtgatctgcccctcttggccttccaaagtaccgggattacaggtgtgagccaccacgcctagcctattttatttatttatttatttatttttgagacagactctctgtctgttgcccaggctggagtgcaatggttcagtcttggctcagtgcagcctctgccttctaggttgaagcgattctcttgcctcagcctcccgagtagctgggattacaggcgtgcaccaccacgcccagctaatttttgtatttttagtggagatggggtttcgctgtgctggccaggctggtcttgacctcaggtgatccgcctgtctgccttccaaagtgctgggattacaggcgtgagccactgcacccggccttattttatttttttgagatggtgtctcgctctgtcgccccagctggagtgcagtggcgtgatcttggctcactgcaacctctggcttccaggttcaagtgattctcatgccccagcctcttgagtcgctgggattacaggcgcaagccaccatgcccggctaatttttgtatttttagtagagacagggttttgccatgttgggcaggctggtcttaaactcctggttttaagtgatctgcctgccttgacctcccaaagtgctgggattacaggtgtgagccactgcaccctgccacactttgatttttttttaaaaaaaggatataaaatgactttttttctgtcacacctcagattttctcccactggtgaatttcttgggtatccagttttatatgcatatacaagctcatctatatcaacctgtctagctatctaaatttacttttttttttgagacagagtcacactctcgcccaggctggaaggctgtggcatgatctcagctcactgcacccttcacctcctgggctcaagcaatcctagcacctcagtctcccaagtagttgggactacaggtgcatgccaccacacctggctaatttttgtattttttctatagagacagagtttcaccatgtttcccaggctggtcttgaactcttggactcaagtgatctgcccgactcggcctcccaaactgctaggattacaggcatgagccacctcgtccgccctttctgcttttctttttgtacaatgtggatcatacattacatactattgtgctgtttgctcttttcatttaatatatagtggatatctttctacttcagcatataactggtctggggaggccttcaacctcatttgttagtgaccttaaaaatgtacggctggtaatgggaatataaactgacgtaatcttttttgagagcaatttggcagtttgtgtcagatggttttgttagtttttgacctggcaattccatttctaggaatttagtataaaaatataaagaagaggaaatgcagctgaagtaggaaatggtgattacttaggtgtcactcttcctcaggagtccccttgaggctgtctaatcccttcctgtggggctggggcagcagtcagaagactgccaacagatggcatcttttaggacttggaagaaaaaaaagttgcttgtttaccttgggtgattactttcattatctaaacaggttaatgactgttttctacatttgggatagttaaatttcttccgaatggaaactataatgtgtttgtataagtcagtctagtgaaagcctgtaaaccctgtaaaaaacatgcatgttggaatacagaagctcagaatactagcccatctttgaggtacattagagcttttagaattgtctaaatagtttctttttactcttaatacaccttgttttgtttctgtggatttatgcatagttgcttggtttctccctctccctcatttcttcatctccctccaggataatttttataaaagtgaggatttgaaaaaaagttttattctctcttaaattgtggtataaaacttaacattgtttagagaaagaaagtttcatgttatttagtctccttattttggggatggggcatttgggcatttggacagattgttgtcttctgtggtgatcaacaattctgaaaaaggaaaaaagttctgaaaaaaattttgtagcatttcttgaaatagatatagaaggaaagtagttttggcttttatttcctcaaacttgtaagaggacaggagaaagactgagataaaagaatagaaaagacatttgtttgaggccaaaccatcaagaattagggggaaaaaatttattttacattagatacagtgctcgtagcaaatcaagataagcaaaataagccaagtaggccaggcgcggtggctcacacctgtaatcccagcactttgggagcccaagacgggtggatcatttgaggtcaggagttcgacaccagtctaaccagggtgaaaccctgtctctactaaaaatacaaaaattagctgggcatggtggcaggcacctgtaatcccagctactcaggaggctaaggcaggagaatcgcttgaacctgggaggcacaggttgcagtgagccgaaattgtgctannnnnnnnnnnnnnnnnnnnnnnnnnnnnnnnnnnnnnnnnnnnnnnnnnnnnnnnnnnnnnnnnnnnnnnnnnnnnnnnnnnnnnnnnnnnnnnnnnnnnnnnnnnnnnnnnnnnnnnnnnnnnnnnnnnnnnnnnnnnnnnnnnnnnnnnnnnnnnnnnnnnnnnnnnnnnnnnnnnnnnnnnnnnnnnnnnnnnnnnnnnnnnnnnnnnnnnnnnnnnnnnnnnnnnnnnnnnnnnnnnnnnnnnnnnnnnnnnnnnnnnnnnnnnnnnnnnnnnnnnnnnnnnnnnnnnnnnnnnnnnnnnnnnnnnnnnnnnnnnnnnnnnnnnnnnnnnnnnnnnnnnnnnnnnnnnnnnnnnnnnnnnnnnnnnnnnnnnnnnnnnnnnnnnnnnnnnnnnnnnnnnnnnnnnnnnnnnnnnnnnnnnnnnnnnnnnnnnnnnnnnnnnnnnnnnnnnnnnnnnnnnnnnnnnnnnnnnnnnnnnnnnnnnnnnnnnnnnnnnnnnnnnnnnnnnnnnnnnnnnnnnnnnnnnnnnnnnnnnnnnnnnnnnnnnnnnnnnnnnnnnnnnnnnnnnnnnnnnnnnnnnnnnnnnnnnnnnnnnnnnnnnnnnnnnnnnnnnnnnnnnnnnnnnnnnnnnnnnnnnnnnnnnnnnnnnnnnnnnnnnnnnnnnnnnnnnnnnnnnnnnnnnnnnnnnnnnnnnnnnnnnnnnnnnnnnnnnnnnnnnnnnnnnnnnnnnnnnnnnnnnnnnnnnnnnnnnnnnnnnnnnnnnnnnnnnnnnnnnnnnnnnnnnnnnnnnnnnnnnnnnnnnnnnnnnnnnnnnnnnnnnnnnnnnnnnnnnnnnnnnnnnnnnnnnnnnnnnnnnnnnnnnnnnnnnnnnnnnnnnnnnnnnnnnnnnnnnnnnnnnnnnnnnnnnnnnnnnnnnnnnnnnnnnnnnnnnnnnnnnnnnnnnnnnnnnnnnnnnnnnnnnnnnnnnnnnnnnnnnnnnnnnnnnnnnnnnnnnnnnnnnnnnnnnnnnnnnnnnnnnnnnnnnnnnnnnnnnnnnnnnnnnnnnnnnnnnnactatataattttttttcttctttttggagacagagtcttgctctgttttctaggctggaatgcagtggcatgatctcagctcactgcaacctccacctcccaggttcaagtgattaccgtgcctcagcctctcagtagctgggattacagatgcgtgttaccacgtccagctattttttttggtattttcagtagagacagggtcttaccatgttggccaggctggtctcaagctcctgaactcaagtgatctgtctgcctgggcctcccaaagtgctggttacaggtgtgagacactgttcccagctaaactatatatatatttttttgtttgtttgtttttgagatggagtcttgctttgtcgtgcaggctggattgcagtggcacgatcttggctcactgcaagctccgcctcctgggttcacgctattctcctgcctcagcctcccgagtagctgggactataggtgcccgccaacacgcctggttaattttttgtatttttagtagagacggggtttcaccatgctagccaggatggtctcgatctcctgacctcgtgatccgcctgcattggcctctcaaagtgctgggattacaggcatgagccaccgtgcccggctatataatttttaatagctacaaataattttgttataactttggtgggctgtaatttatttaaccagttccttttgtggaaaatttgggtttctttctttttcttttctttctttttttttagagacggtctcattctgtcacctgggctagagagcagtggtgtgatcacagctcactgcagccttgaactcctggactcaagcaatcctcctcctttagcctctggagtaggtgggaccacaggtgcatgttgccatgcctggccaagtttttattttttgtggagatgggtgtcactatgttgcccaggctttcttttctctttttagagacgtggtctcactctgtggcccaagctggaatgcagtggcatgatcatagctcactgcagccttgaactcctgagttcaggcgatcttcctatgtaggtgagataggtgtgagccatcacgcccagcagaaatttgggtttccaattaattatctttgtgcatttgtgttagttatttagactcatttggggaagaatgtacaagccttgaagtttcctgtctgtattttgttcaccccaggtttcagccatgccacagagctccggcagtcatgggcccgctatagcagcagttcatagcagccatcatcacccaacagcggtgcagccccacggaggccaggtggtccagagtcatgctcatccagccccaccagttgcaccagtgcagggacagcagcaatttcagaggctgaaggtggtattcagctctttttcttgggtcaaaaaatttatctttagcaggaaatactggttgcagcttgttggttgtggtggtacaacttctaacctgagatactagctgtcgaatcacaagttttaccgtttttgttttgtgaaatttgcttatgtttcctatcttggcatcagtgcctgatccagagaagaatatactcaaatgtttgtggactgtatgaatgcatgtcggtcaaatgttatcaggattgtggggccattttaatacaaaataaaccttaaaattcattttttggctgcttccttttgaactctctattgagcacatatatgattggctacaggttagtacagtaaattggcccagtaatatatcttacagttcaatctttttaaattcttaaaaatttttttttttagtttttagtttcagagatgggagtctcactgtgttccccaggctggtctcaaactgctggcctcaagtgattctcccatcttggccttcgaaagtgttgggattacaggtgcgagccactatgcccagctcatgcctgtaatgttcttattacctttatctttttattcctgtttatgaatagctgaattgactcacatcatcaagtccattcttagtaaaacacatgctcctttttggggggaatctttataaagttcagggaaaactgtaactgtgaatgaattatcagtgttttcatattttctgctgagtatgtgtggtacgttttcagtgctttgaaattcatgaggcatccctggagaagtgaagcttgtgttcccagctaaccttgtatctctgaccacttgaatgttacttttcaaaatatgtgattgttgcagcaagtgttcaggtttcaatttttctaattttacgtttatataaaattaagttcaggaaataataaatggaggaactctgaagagatgttaaatcttcatttggttattgcaacctacttatgttgcttgcaggcacgaatgagaaataaaccctctaaggacatatccatatgcagcaaatagttgtttcttctgttttccctgatacttactttagttcttcttgatccctgccctcgttggtgtggattcttgggaacttgtttaatattggcctaagagtattaaatgctacataaatattataaagtacagcaaagctatgtgatttagagtaattttgtaaaatttactctctatattggcttacatagtattgactaatgcatagccttttaaagagagtacaggttttttaggcctgaagcttcactctggattctgtctttgggaaaatgtgtataaggaatattgatgtttcctttaaaacattttcagtctgttgtagagtgatggctgtgtaccaaaatgtattattgctgcgggcttagcactttactaagtcctgaaaatattttttttaaaacttggttgtgcgtgatttaattctgtattaacactgtatattcagtagttatactttaatgttgcaaaatagcttataaacttgcttattaaactaacaaaaacatatgtatttctatagcctttttcaatcaaccctatcaaagcacaacaccagtttttacccaccttcctcacaggactctttggtataagtatatggattatgttttgtttgctttatggaaactggcaaggaaacaaggaaaggttttggatttggggttatagagtgagtcatagatagagttaggatttcttgttgtgttcttttagtcacaagctcttgactatattcctgcataaaataacttgttgaatttcctttctgatgaggagaggtaaaatgcttcttgtacctccatgtaatttaactcagtattcccacattgcctgtcatttttggatcagtcttaaaatgcattacaagcatttgaatcaacttcaataaatcatttatattctataataatgtaggccgggcatggtggcttacacctgtaatcccagcactttgggaggccgaggtgggtggatcacctgaggtcaggagttcaagaccagcctgacaaatgtgatgaaaccatgcctctactaaaaatacaaaatgagccaggcatggtggcgcatgcctgtaataatcccagctactcaggaggctgaggcaggagaatcgttggaacccaggaggcagagattgcagtaagccaagatcataccactgcactcgagtctgggcgacaagagtgaaactccgtctcagaaaaaacaaacaaaaaaaaagaaatgttcagtgagaatgcttacacattatttcaagcctcaacattgtcttttttttttgttttttgtctttggtagattggtggtgacaagaagggatttgaacgatttgaggcatgtttggtgttatttagttattgaatgtcagcagcagtgatatttggtacatatttagcaggttatctttacagttgcttgtgtttttctctcccaacaagattgtagacttcaggagattcagggccttaatagtaaatccctgttgaagtgagctaagaaactttatcagcagagtctaagggtctccccaagtgcttccttaaatctgtagcttctaaataactacatccaagttttttttttaagttgtgctacctagaactgtatacatgcatttatagagagtttatataagagttggactatgctttaggtgatgagagaatttcctcactatttttacatgtaggtgtcttatttattatgtgagtgtcatgcagagtttttaaagcataggattattctataacttttattttacttttttgtttttttgagacagagtctcactctgctgcccaggctgtagtgcagtggcgccatctcaactcactgcaccctcccctgcctgggttcaagtgattcttatgcctcagtctcccaaatagctgggattacaggcatgcaccaccaagcctaatttttgtatttttttttttttttactaggacggggtttttccatgttagccaggctgctctcaaactcctggcctcaagggatccaccctccttggcctcccagagtactaggattacaggcatgagccaccacaccctggcctataactaatttttaaacagtggtttgcttggtttgctgtgactttcagtacctttttgtttcagacatatacatatcacacataattgctttcttttgggtttctgtactttttccgtctctgcagtagttaccttataccataccatgtcttattgataactgttcttttgttgtgtaatgatgcatgctattcttaaatatcttccaaagtcttggttccttttgcaaacttaatatattttgtgttcacttaagttggtcattaatgaaacattttagtatggaaagttcagaatatgaattaaaatagtccattgaatttcaacagaaattgtcatgatatttgtatagaaaaactaaccatcaaacaagtgggtattgaccaactatacaatctgatttctagcaacaccgaaacactgattaaccatggccgtaatggaagtctgaagaactcttaaacagccatttgtctcggggccgggtgcggtggctcacgcctgtaatcctagcactttaagaggccgaggcgggcagatcacgaggtcaggagatcgagaccatcctggctaacacagtgaaatcccgtctctactaaaaatagaaaaaaaaattagccggccgtggtggcgggcgcctgtagtcccagctacttgggaggctgaggcaggagaatggcgtgaacccgggaggcagagcttgcggtgagccgggaaagcgccactgcactccagcctgggcgatagagcgagactctgtctcaaaaaaaacaaaaacaaaaaagcggccatttgtctcaatccattagtgctgctataacaaaatacctgagactgtataatctaaataatagcagtttatttctcacagttctggagaagttctgggggctgggaaatctaaaatcaaggtgctggccgggtgcggtggctcacgcctataatcccagcactttgggaggctgaggagggcagatcatttgaagtcaggagttcaagaccagcctggccaacatggtaaaactaccgaagatacaaaaaaatgagccaggcatgatggcatgcacctgtaatcccagttactctggaggctgaggcacgagaatcgcttgaactcaggaggtggaagttgcagtgagccgaatttgtgccactgcactccagcctgggtgacagagtgagaccatgtctcaaaataaataaataggccagacgcagtggcttacgcctgtaatcccagcacgttgggaggccgaggcgggcggatcacgaggtcaggagattgagaccagcctggccaacatggtgacaccccatctctactaaaaatacaaaaattagctgggcgtggtggcaggcgcctataatcccagttactcaagaggctgaggcaggagaatcgcttgaacccgggaggcggaggttgtattgagctgagatcgtgcctttgcactccagcctgggagacaagagcaagacttcatctaaaaaaataataataataataaataaaataaataataaaataaaatccaggtgccagttggtttggtgtctggtgagggcctgaactctgtttttcgagatggtccctgaatgtgtgtccttacactggaagggagaagggccgaagggactaacactggttcactccagcccttttataaggtccctaatcccattcatgagggctccacaatcactttctgaaggcctcacttcttaatatcatcatatcggtgattaagtttcgatgtaagaattttgtgggacacatttcagaccacagcaccagttaatgattgacttgaatgtaaatgttccattttgcaacaaatcaaaagactatctatgcctggccaggtgtggtggctcacatctgtaatcccagcacattgggaggctgaggcaggcggatcagttgaggtcaggagttcaagaccagcctggccaacatggtgaaatcccatctctactaaaaatacaaaaaaattagttggatgtggtgacatgcgcctggaatcccagctactcaggaggctgaggcaggagatatcacttgaacccaggaggcagaagttgcagtgacccgagattgcgccattgcactctagcctgggagacaaaatgagactcccatctcaaaaaaaaaaaaaagaaaaagactggcttaaatcacatcaaatgtttatttctgaaatttcttaaacctgatattttgtataattttaaatatttaggcttcagttaaactaccaaaataaaacttaacgtatctcagagtaaataggaaacacctagtggggatttcttttgggtgtctctgtcctaaatcagactcatagcttagcctttccaacctgttcttctttgtgataggtcagttttttttctcccccagccaaactgtatccagctttaaagatactttccaaaaacagtcatggtatttcaggcagaacatggacaatccttaacaatgagctaccaaaaaaaaaaaagccactataaaacccagtgaagtctcatttgatgctctgaacagggaaagtttagagtgaaggttgacacttcacatttagcatgttgtttaacaacttttcacaagccaaccctgactttcaggaagtgaaatgaaaatggcaggacttatctgaagatccacagtctagaaaaagcaaccactgctcttttgagggctgccatttcagtggcatcactggaaagtttgactgcctgacatattggtaaccagttattgggggttaggtcccaacaggtgtctgggtaaaagggagttaggtctgtgaaggtggggagggagaacaggatgtaaaaatgaatttgtttttccatcccacaaggtgtttgtgccaaggtggccatgtgtgttaaaagtcagggaatctaggctgggtgtggtggctcacgcctgtaatcccaggactttgggaggctgaggctggcagatcacttgtggtcaggagtttgagaccagcctggccaatgtggtgaaatcctgtctgtactaaaaatacaaaaattagccaggcatgctggcgggtgcctgtaaccccagctactcaggaggctgaggcaagagaatcgcttgaaccccggaggcagaggttacagtgagccaagatcgcaccactgcactccagcctgggcaacaatagcaaaactctgtctctaaataaataagtaaataaagtcagggaatttcttctataagccaagaggaagtctctcaaaactagaagggaaaggtgttttccccacgtcagtccagcttcaaagacattctattagtgacctgtgatccttcccaccaaaacaacaatgaagtgttctgtgtgcgataacaacactgctttagaaaaagcaaaacaaaattctgcatttttataaagcttgatttaaacaatggtatttcaaaatttacaaacttcataactttatagttcaaactttacagtcaccagaagtacacagttaccaaaaatgcacatgtttcacttggcatctctagcaccttcagctttctgtgcctggtctgttttggcatctccatttcctgcaaggttattcccctccctgccagtgtcagcattttcctttttccctttgggtacctcctctctctcctttgcaggggactttttttttttttttttttttcctgagaccgagtttcactcttgttgcccaggctggtgtgcaatggcatgatctcgactcaccgcaacctccgcctcctgggttcaagtgattcccctgcctcagcctcccgagtagctggcattacagacatgcgccaccatgcctggctaatttttgtatttttagtaaagatgggtttctccgtgttggtcaggctggtctcgaactcctgacctcagatgatcctcccacctctgcctctgaaagtgctgggattgcaggtgtcagccactgcgcccagcctgcatcctttttagggttgggctctggctttggaggagcaggtttagcatacaaccttgcggatcttctctgggttgttcttcaccttggctctatctcctttagcatccccttcaggctttctcttgggtgtggtggtgatgtggaaggatgtaagcgctgagtgcgggatgcagtggcatgtgggctttgatcggtccgagagtcactcttgactgttcttcctcagtgctccgtggcggatcacttttgaatgctggctctcccttagctcctctattcagtcagttccccaatcctgtcacttctactacccaaaaagcttttttatctatgcagttctctctgttgttctgggccagtactataattcaagccactgttttcacatgagttgtccagttattcctgtagcatacctggtcttcctacctcctttcaatcttttctgctcttgtgccaattttttctcaacactgcagtcaaattgcgtacacgaaaatgcagatgataaaaatctaaattgctttttcacaagatttacaaatcctttcagaatctagatcctgcttttttttctgtctcattttgttacttttccttcctcttcactacagatcctccagccaaactaaactgttttcagatttctaaatatcccatatcgtatcctgtctaggattttacccgtgctgccgcttttgattttcttcactggtcttcacttttgctagcttatagtcatctttaggtctcagtttatacattacctcctggggaagcctcactttttttggtggagaagacgtgtccttcccatgtcatctccaggcatggagtgattaccgggttacccactgtgttatgattcctgactacatacaaacaaatgtctatagacgaggggctacaaattatttgtcattgaatccttggtactcacattgggcctggtatgttgcagtttagtagatacttgtgaaatgaattaataaatgatatatcattgtaattattcttcactgatcattctgttcaaaattttccaaggcaaggctacagattttatgagttgattattattttaagcttgagtttattattggtatccatactaacttttaagtatatatttaatatatttttacttcatttactgcattaagcatacttaggcataaataatttgtttttgttttttttttgtaattatgagcttactttctttttataaccttgatatttatccctgcctcaggtggaggatgcgctatcttatcttgaccaggtgaagctgcagtttggtagtcagcctcaggtctacaatgatttccttgacatcatgaaggaatttaaatctcagaggtaaaagatgtgtgattgtactcaagctttgtatctggcatattgattttggaaggaagaggatatagtttatttactggaagataaaggatgctcctttttgcagctgaattttcaaaatcatgcctttattttatgcatacctttattgatggaaattatggccactagacttttttatccctattggtaaattttccttaactaaattttttccagtgttttgtctcaatcagggaagtagcactggtagtgatttaggctacttggtttctgaattggtttagatacccttatattctggcatggttcactgttgtaagagtgtaactcatctgaacaatgtagatgtgtgctgaaatgatgtatactggtatatcaaagagtgaatcttgtttgggatatgtagctttatatatatcatctgagtatctgcttggtagaattattacaatgaacatatattctgttaaaaattttgaccattccaaaaattagccgggcatggtggcgggtgcctgtaatcccagctacttgggaggctgaggcaggagaattgcttgaacccaggaggcggaggctgcagtgtgccgagattgtgctactgcactccagcctgggcaacagaatgagactctgtctcaaaaaaaaaaaaaacaaattgtggccaagtatctttgagtctaaaactaaatggctttggaatttcagagttcgtgtgttaattttaaaatgcgtagatgatctgttttcctgtttagagaaaacctagtagaaagtgaaattttgagtgaggtggctcatgcctgtaatcccagcactttgggaggccaaggtgggcggatcacctgaggtcaggagttcgagaccagcctggccaacatggtgaaaccccacctgtcctaaaaatacaaaaattagccgggtatggtggcgcatgcctgtaatcccagctacttgggaggctgaggcaggagaatcacttgaactcgggaggtggaggttgcagtgagccaagaccccaagattgcaccattgcagtccagcctgggcaacagagtgagactccgtctcaaaagaaaaaaaaacatgaaattttttcttaacagggtgtttgttaagcttacagtttatcacttttctttttgttttttatcagcatcgacaccccaggagtgattagtcgtgtgtcccagctattcaaaggccaccccgatctgataatgggattcaacaccttcttgccccctggctacaaaattgaggtgcaaaccaatgacatggtgaatgtgacaactcctggccaggttcatcagattcccacccatggcatccagccacagcctcaaccaccaccccaacatccttcccagccttcagcccagtcagccccagctcctgcccagccagctcctcagcccccacctgccaaagtcagcaaggtgagcacttggaaaatattgcatcaatatgaatgcatccctagagagcaccttcctttgatgtttcccctttatataagacttagatactgagaaacaaagttacaaagatttcgtcatagaaaaatgctgtatgaaaacttcactatgacatggttcacatttacacatcacttacttaggtatctatttaaatcaacacagcaacaactttcaaggtctttctttttacagtttctgcttataaaaccatgaacatcccaacaggtggtgactttgtgtagtagtagttgacagcacagatagaaaccatcgtcttatcctggtcaaattgtgctgctgcccacatggttattttatgaaagttatttcactaactagattatatcaagctaagtagaagatctaatgaatagtgatagtgatggtgatgaagatggggtgttcttggtctagaaccacactgtctgacacagtagccactagccacataggactatttaaattaaattcagtttttcatttgcactagctttcaagtgctcagtaacctcatgtggctggtggctatgtataagacagtgcaaataaaggacatttccatcatctcagttctacaggacagagttggcgtagaagacttttttatgtggagctactgcaacagttgtcttgttgttgacatcaaaaggctatgtagaatgagattttttctatgtgtacttgttgagctactaagctaaaacattgcatatgaaaaattcttccctgtaattggagatggctccagttttaaggttttatttagaaaatgtgagactgaaatatttgtatcagcatgtttgaaccgcctacaactcccactgctgcccagtatgatttgtgttggactaaaatgacctggcctgagtgagtaaataaaggatatacgttgacaccttgtttctctttagtttgaactttccttgtatcaactcatctatgcatctgaagagaataaagatttcttttctttctagccctcccaactgcaagcacatactccggccagtcagcagactcccccacttccaccgtatgcatccccacgttctccgccggtccagcctcacacaccagtgacaatctcgttgggaacggccccatccttgcagaacaatcaacctgtggagtttaatcatgccatcaactatgttaataagatcaagaacagatttcagggccaaccagacatctacaaagcattcctggagattttgcacacatatcaggtaaggagtgcccattcagcctgtcttaaccaggtcaccctcttagggcatctagtccaataacaagtaaccattattgtgtccattaattcatactggaaattaaccagttagaaactatcatgcatgtttttaaagccagtttgtttgtttgtttgtttttcgagacggagtcttgcactgtcacccaggctggagtgtagtggcacgatctcagctcactgcagtctccgcctcccgggctcaagtgatactcctgccttagcctccctagtagctgggattacaggcgccgcccaccacgcccagctaattttttgtattgttagtagaaatgggatttcactatgttggctaggctggtctcgaactcctgaccttgtgatctgcccacctcggcctcccaaagtgctgggattgcaggcgtgagccaccgcccccatgctataaagccagttttatttgcctgacttgattgccctgcaacattcagtcaggattttttttttttttttttgagacagagttttgctcctttttgcctaggctggagtgcaatagtgcagtgtcggctcactgcagcctctacctcccgggttcaagtgatttcttgtatttttagtagagacggggtttcaacatgttggccaggctggtctcaggtgatccacccgccatggcctcccaaagtgctgggattgcaggcatgagccaccgtgcccggcctcagtcaggattgttagtcactgtcccatgaaatgaaactcagttnnnnnnnnnnnnnnnnnnnnnnnnnnnnnnnnnnnnnnnnnnnnnnnnnnnnnnnnnnnnnnnnnnnnnnnnnnnnnnnnnnnnnnnnnnnnnnnnnnnnnnnnnnnnnnnnnnnnnnnnnnnnnnnnnnnnnnnnnnnnnnnnnnnnnnnnnnnnnnnnnnnnnnnnnnnnnnnnnnnnnnnnnnnnnnnnnnnnnnnnnnnnnnnnnnnnnnnnnnnnnnnnnnnnnnnnnnnnnnnnnnnnnnnnnnnnnnnnnnnnnnnnnnnnnnnnnnnnnnnnnnnnnnnnnnnnnnnnnnnnnnnnnnnnnnnnnnnnnnnnnnnnnnnnnnnnnnnnnnnnnnnnnnnnnnnnnnnnnnnnnnnnnnncagcattgacagagcaggaggtgtatgcccaggttgctcgtctctttaaaaaccaggaagatttgttgtcagagtttggacaattcctaccagatgccaacagctccgtggtatgtttttttaataagaattacactatttactattattatcttagatgagttggaaaactgtgctcagaaggggacttttcctagatgatatttgtttgctttgataagagcattaatctcattcatgtgtcttaatcagcttttaagcaaaacaactgctgagaaggttgattctgtgagaaatgatcatggaggcactgtcaagaagccccaactgaacaacaagccgcagaggcccagccagaatggctgccagatccgcagacatcctacaggaaccacccctccagttaaggtgagaatgggcagcagctgctcattttgacactcacaagtatttctaatggagaggtactctagaggtggtcatgtgttttgttgttgttgtttttttttgtttttttgagaccgagtctcgctctgtcgcccaagctggagtgcagtggcacgatctcggctcactgcaacctctgcctcccgggttcaagcgattctcctgtctcgctctcccgagtagctgggactacaggcgcatgccaccataccgggctgatttttttttttttttagtggagacggggtttcaccgtgttagccaggatggtctcgatctcctgacctcatgatctgcccgcctcggcctcccaaagtgctgggattacctgtgcccggcagtcatgtgttcttaagtgtgttaacggttgggtcctagatatttggaggaagttagtattgtgtcacagaaactcagtgcagagtttatctggctttgcaaaagagtattagaataacattgattgcttggattactgtacttttctgagttctttattatctctcctttgcaatgagctgtcatttctttaatgttttggttgctactaagaatttccaatacttgaaatttttttcccttcttttttttttgagatggagtcttgctctgtcgcccaggctggagtgcagtggtgtgatctcagctcactacaacctctgcctcccgggttcaagcaattatcctgccgcagcctcctgagtaactgggactacaggcgtgtgccaccacgcccagctaatttttgcatttttagtagagatggggtttcgccatgttggccaggctggtcttgaactcctgacctcaggtgatccacccacctcggcctcccaaagtgctggaattacaggcgtgagccaccgcgcctggccccttcttctttgatgctttaaatctgccttgtgttaagaaagaacattcttgagcttgagaattatttcagaaataagtggtctctgaggtcctcttgtgagtagagtgcatgtgttttttgagatctctggtctagaaccctgtcctgctcaaagttctttgttgggttaccagatcttatgtgtatcatcttaatctccaaggcaggacctttgggctgtagcagagggaagtcttaaactcctcttagtaatccattacatgatgttttttgttatagttaacactgatggtctgcctgcagaaaacttagcttgctcccttctttgatgtaacacagctatgatagggagagggctagttgtatgtattgaatgtttaattcttcagtgaatttcaaagcagtatgtaatatagaagagacagatatgtctgcagaattaaataatgacaaaagtttgggaatttctaatagtaagaggtggctgatgaatagtgattgactgactacaaggtctgacgtactaggtgttactgacacttttgaagtatccttttcattagtgtttgtcatggtttcttcttttgaaatcttttgaaatcaagttgaacataataatggtttctatttcttcatttcaataaagagaattagttatatgggtagcaagaatcagctcagtagatacactccatgcttggatttacgtccgcccactcttgattacctacaggtggcaagaatatagtgggggcttaaaattctccgcctactttctccataggcagtgtaagcagaggctgcggctcttaagaaagtatactctgagatagccaaggtaaatgtgctacttctcacaaagtttgtgcatttcttcatagagagtaagtggtggattttaaaagtaacttcttgcctgacaggattatatcatggcctgttggttccctttagaagaacaatattaaattagtctgagtggatattgctggcgtgcctttttttttttttttttttttttttttttgagatggagtctcactctgttgcccaggctggagtgcagtggcgtgatctcggctcactgcagcctccacctcctgggttcaagcgattcttctgtctcagcctcctgagtagctgggaccataggcgcacactaccacgcccagctaatttttttgtatttttagtagagacggggtttcaccatgttggccaggatggtctcaatctcttgacctcatgatctgcccaccttggcctcccaaagtgctgggattacaggcatgagtcaccatgcccagcaaattatgctttttaagtaaatttttaattgaaatattattcagggttaaagattgatttctgtcaatttgtgagctctttttacaaacagccttttctccctcagctggtaggagaacaaaacagtggcattagattctacatgaagttactttgggcccctagaaaaagtaaggatattctaaaagtttgtcacagtaatgtcatgatcatttctggagaaaatattttgggggtagaatgatctttgaacctctgttgtagaaagaaacttaataggcaaactgaaatagaaaatatgagttgaaatcttagagggtatggagtgagttggttagagttctctcatttgtttcaaattattaatcagcagtggtttcagtgatgaaaccattgaatacagacaaaaataaaattcagagaaaaccactcgttgaatctcacatgtttgtatctttcttttgcagaagaaacccaaactgctcaatctgaaggattcttctatggcagatgccagcaaacatggtggtggaacagaatcgttattttttgataaggtgagtaatggatgagttagatttgatagtgcctgttaatgccaaaagaaaatcatcttatccccctggaaggtttcgttttaaaggtgtcaggctaattaggactttctgttttttaacatagtttcccagttgtgagtcctttgagtctgctagtactattagcatagctagaaaaatggtagcattgtttgctttggttttatgaagcagtttggggcagaagacagatttttagaaaatgtattatgtttctcttgaaagatgtttggagctcccattgtagatatccaggtctgtgtggcaggcagtaccagtgcctgtaccaatttttgaggatttaagatgacttgtaatctttttttttttgagacggagtctcgctgtcgcccaggctggagtgcagtggcgcaatctcggctcactgcaggctccgcctcctggggttcacgccattctcctgcctcagcctcccgagtagctaggactacaggcgcccaccacctcgcccggctaattttttgtatttttagtagagacggggtttcaccgtgttagccaggatggtctcgatctcctgacctcgtgatccgcccgcctcggcctcccaaagtgctgggattacaggcgtgagccaccgcgcctggccgatgacttgtaatcttattgctgtgatagttatttgtagtacacacatacatagcattcaggggaattctaatttacttgcatgttttcaaagctacccagctgattctaatgagcaacgagagttgagattattggcataaatgatgttgtgtggtgccttagtttggccacataaacttaagtgtgatttgctcctcggagtcaacttgatgattagcaggaaactttcatcagggtagctggcacctgttgggcttctcactggtaggaatcaacctggattgatctgtggtgattgactctattttctgcctcttgggttttgcagaagggcagatgatttaacatctccgtgattagtatctcctgatccctttctgtctgctgtgcctatgtgagctttttgcaggagagtcctgcaagagtgttgagtccttagctctgatgtgaatcattaccaaagtctgcttgggcggttggtgctcttagacaagtgtggaagtctagatcacaaccaataaatgtcaagaaaagggtatggaagggaagctattataaattaagaattaagaaatatataagccaaatgtgacatgcagactttggattctgaatttaaaagctgatttatttttatttttatttttatttttgagacagagcctcactctgttgcccagcttggagtgcaatggcgcaatcttggctcactgcaacctccgcctccctggctcaagcgattctccagccttagcctcccaaacagctgggactacaggcgcctactaccgtgcccagctaattttttcatttttagtagagacagggtttcaccatgttggccaggctggtcttgaactcctggcttcaggtgatccacctcagcctcccaaaatgctgggattacaggtgtgagccaccacacctggccaatagccaatttttaagacattaattagacaattgaacttgacacggactcaatattagatgctattaaggaatcttttttacatttttgggtttttttttttttttagacagagtctcgctcttgttgcccaggctggagtgaagtggtgtgatcttggctcagtgcaacctccatctcctgggttcaagcgattctcctgcctcagcctcctgagtagctaggattacaggccccgccacaacgcctggctaatgtttatatttttagtagagatgaggtttcactgtgttggccaggctggtcttgaactcctgacctcgggtgatcagccctccttcgcctcccaaagtgctgggattacaggtgtgagccaccacacctggccttttttatttaagagatgggctcaagtgatccttcttaccctcctgagtagctgggacttgcaggtacagaccaccacactcagctaatttttaaaatttttttggagagagggggtctcaatgttttgccctggctggtctcagactcctgggctcaggcaatcctcctccttcggcctcagcatttgccttccaaagtgttgagattacaggtgtgagccaccatgccttgccttaaggagtcttctgaaaataagttaatttctaagagtaatgggttttttgtttttgtttttgtttttttgttttttttttattttttttctgggacagtctcactccattgctgaggctggggtacaatggtgtgatctgggctcactgtaacctccacctcccgggttcacgcaatcctcctgcctcagcctcccgagtagctgggattacaggcgcccaccaccacacccagctaatttttgtatgtttagtagagacagggtttcactatgttggccaggctgtctcgaactcctgacctcaggtgatccgcctgccttggcctcccaaagtgttgggattacaagcgtgagccactgcacccagtcctgtaatggcattttcttagtactttttcttaaacatatatactatatctagatgaaatgtctggaatttgctttaaaatgcagtggtaggagaagtaagtatagatgaaacaaaatttactatagatcattgaggttggggtgagtacataggttcgttatacttctgtctacttttgtgtatgtttaaaagctaataaaaagtaaaggtaaatagggtatacagtataaaaggtacagtgttcttttatctttagctttaaaagtctagattctatatagtgtctactgatgaatagttaagaaaagcatacggaagtctggagcaggggttgctgataagccacttggtttggtggcagtctgtggtcttcaccaaaggatcacagtgctaaatacttattttggaactgaaactccagattggtaatctagctagactagttttactttgtctatgccattgatcatttttgggtttttggtattaagatgctcaatattgtaaatagaggaagaaaaaagaccagatcagaggacagaactatcttaagagagcgttattccagattaccagagtttaaaacagccttggcaaagattcttgctgtaaacatgttaagagaggcaacaggccggacgcagtggctcacgcctgtaatcccagcactttgagaggccgaggtgggtggatcacctgaagtcaggagttcaagaccagcctggccaacatggtgaaaccccgtctctactaaaaatacaaaaaaaacattagctgggcgttgtggcaggtgcctataatcccagctactcgggaggccgaggcaggagaatcgcttgaacccgggaggcagaggttgcagtgagctgagatcgcgccattgcactccagccaggacaacaatagtgaaactcggtctcaaaaaaaaaaaagaaaaagaggcaacaaaaacctgagtaactctgatatggtgtggagaatcaagcatatgagaaggtatactccgagatctcagtttttaaattgttattatggtattttttttttgagacggagtttcgctcttattgcccaagctggagtacagtggcgtgatcttggctcactgcaacctctgcctcctgggttcaagcgattctcctgcctcagcctcctgagtcactgggactacaggtgcccaccaccacgcctagctaatttttttgtatttttttctttagtagaatggggtttcactatgttggccaggctggtctcaaactcccgatctcaggtgatccacccacctcggcctcccaaagtgctgggattacaggcgtgagccactgcgcccagctggaaaattttgaacatacataaacagaatagtaaaatgattcctcacgtacctaccatccagctttagcggttcccaattctagccagttacttgtttcatatatattcccacccatcccagtttatttggagacaaatcgcagataccttatttcatccatacatattttagtaagtttcttttaaaaatgactcctttttgtggctgggtacagtggctcaaacgcctgtaatcccagcactttgggaggccaaggcgggtggatcacttgtggtcaggagtttgagactagcctagccaatacggtgaaacctcgtctctactaaaaatagaaaaattatccgggtgtagtagcacatgcctgtaatcccacctacttgggaggctgaggcaggagaattgcttgaacccaggaggcagaggttgcagtgagctgagatcgcaccactgcacttcagcctgggcaacagtgctggactgcgtttaaaaaacaaaacaaaacaaaaaaactccttattgcaaacataatcattatcacatctaaaaacactaacgttgattccttagtgtcatcaaatatcagtttaaatttccccgtttttattttatttttttacttatgagacagagtcttgctctgtcacccaggctggagtacagtggcattatcccagctcactgcaacgtctgcctccagggttcaagtgataatcttatgtttcactcagccacccaagtagctggaattacaggcgtgtgccaccatgcctggctaatttttgtatttttagtagagacggggtttcagcatgttggccagtctgggctcgaagtcctggcctccagtgatccacccaccttggcctcccaaagtgctgggattataggcatgagccaccacgcccagccacaaatttccccagtttttaaaaactaatggcagggcagctgggcaatatatgacctcgtctctgcaaaaaatttagaaattagccaggcatggtggctcacacctgtagtcccagctacttgggaggctgaggatgggaggctgcagtgagctgagattacacaactgcgcctcctacctgggcgacagagcgaggcccttttcagttccccactttaagaaaaacaaaaactgtttttcttcccgttgtctccataaggtccgaaaggctcttcggagtgcagaagcctacgaaaatttcctacgctgtcttgttatttttaaccaggaggtgatctctcgtgctgagcttgtgcaactagtctctcctttcctggggtaagtgaagtgaggggcttagccctgatgcatgatatggagaccaggtaatgtttgatttgtgagagtatatgataggcaaagttaatttacttgagatacatcagttgactcaaatgttagtgccagaagagtcctgagaagtcttctagtccagctctagagatgagaaaatagagagggcattaagtatttatcgactaatggccaagactagtggtctcctgatcttctaaccagtgctggatgtttatcaagaaaaatctctcccagagttctggaatttttttaaaaattattattattattttttttttgagatgaagtctcactcttgttccccaggctggagtgtgatggcatgatcttggctcactgcaacctccgcctcctgggttcaggtgattctcctgcctcggccccccaagtagctgggattacaggtgcctgtcaccacacgcccggctaatttttgttatgttttttagtagagacggtgttttaccatgttggccaggctggtccagaactcctgacctcaggtaatccacctgcctgggcctcccaaagtgctgggattacaggcatgagccactacaccgagtctggaatctttactatatttgacaacctaagaattatgtgaacattaaagcaatattcttgatcaaaagaatggcttgttattttgcctggtttcggtacaactctttgatcaccactttaactgatctgagagtattttattagaaaaaggggaaaccaaatgctcagaagcagttcttcttaggcaggaaataattcatccctggtagcagatttctgatccaaaaccagatggtagtagtcatacctcaggataactgcatcctgcccctaattgcttgtcactttttggtttgattcttcaggaaattccctgagttgtttaattggtttaaaaactttctgggctataaggagtctgtacatctggaaacttatccaaaggagcgagccacagagggcattgctatggagatagattatgcttcttgtaaacgattgggctccagctatcgagccttaccaaagagttaccagcagcccaagtgtacaggacggactcctctctgtaaagaggtaaggccttccctagcaaagatcagccctgggtcctcagctttttccagaagggagtggtggtaccaaggattgagaatttatatgaatgatgaaattaagaacccttttaatcctttttaaaaagaaaatgttttctacttttttgtttgtttttgagacagggtttcgttttgtcacccaggctgtagtgcagtgatgtgatcacggctcatagtgcctcaacctcctgggctcaaatgatcctcccaagtacctgggacttacacatgccttcacacccagctaaaaatataaaaataaaagtttttagttttgtaaagattgggtcactcctcctgggctcaggtgatcttcctgcttcgtcctcccaaagcactggaattatatttccgcttatattcagcacccttttcttactaatagctttttgtaaacttgctaaaggtgaaatttgtgaagtaatattagttgcctatttctctgctagagttttgtcttttcattcagaatgcttaatcaccagaaagcttttttaggcttttgtttcagtctctcttcttctacccaaaggttttaaatgatacctgggtttccttcccttcgtggtctgaggactctacctttgtgagttccaagaagactcaatatgaagaacatatttatcgttgtgaagatgaacgctttgaggtacaagcttgtttggcatttgaagttgggggaaatgggagatgctcagtgagactatcagtacctgtctctgaggggtattaagatggaagagccaaaggctcacattcttctatggtaagtgcttgttgtggtactttccatgctttatgcattggtcaaatgtatatattagtacatgctttatggcaaatgtgacttatctaggccactttagcccttttaactgaaattgtccattgatgactaaataatagttcttttgattttgcatggcattttaagattattatgttttgcatggtgaagaaaatcagtatcctaaggtttatagtactttcttgaagctgtttttaaattatttaagatctgtgtgtattgttacccttagcaagtatcttgccatggttagcaaaccagctctgagaactggcatttttctttcatgtttctggtattgattgctttgttgttttttgtttgtttgtttgtttgttttgttttgtttttttgagacggagtctcgctctgtctcccaggctggagtgcagtggcgcaatctcggctcactgcaagctctgcctcccaggttcatgccattctcctgcctcagcctcccgagtagctgggactacaggcgcccgccaacacgtccggctaattttttgtatttttattagagacggagtttcaccgtgttagccaggatggtctcgatctcctgacctcgtgatccacccgtctcggcctcccaaagtgctaggattacaggtgtgagccactgcgcccagctgattgctttgttttgttttgtttttttgagacagggtctcattctattgcccaggctgcagtgcagtggcacaatcacagttcattgcagcctcaaccttccagactcaagtgtgatcctcccacctcagacccccacccctacccgccaccgagtggctgggactacaggcatgtgctaccatgcctgggtaaattttttttttttttttttaaactttaaattctgggatacatgtgcagaacgtgcaggtttgttacatagatatacatgtgctttggtggtttgctgcacctatcaactcatcatctaggttttaagccccacatgcattaggtatttgtcctaatgctctccctccccttgcctcctaccccctgtggctaattttttgttttttatagaaacagtgttttactacattacccaggctggtctcaaactcttgggtccaagcgatcatcccaccctggcctcccaaagtgctgggattacacacatgagccaccatacctggcctgattggctccttttgaaagaaggctaaattagggacccctttctttttaaagacagagtattgctctgtcaaccaggctggagtgcagtggtgtgatctcggctcactgcaacctctgcctcacgagtttaagccattatcctgcctcagcctcccaagtatctgggactacaggtgtatgccgctacacccggctaattttttttgtatttttagtggagatgggtttcaccatgttgaccaggctggtcttgaactcctgacctcaagtgacccacccgtcttggccttccaaagtgctgggattacaagtgtgagccactgcgcctgtcccaggagctttattttgaagtaattaggaagggaagagtggagtgaataaatgaggtggtagaaggccccataccacctatatcaggagagggactactgaaagtgggctcaatcctcagtgtgtttatatgtctggtttacattatcatttttaaaaagggaagtctggtttgtctaaagatgtaaaatgatacgtatcctatttagtgtatctgttacattaaattgactggctgtgcttatttgtgtggataggtatcttgctggtttttgtttgtttgtttgtttgttttggtactcttttagctctttgccagttttcccgcctcacacttggttcagcagtttctggtgtgtttttaattgagaaccacatgctgcctggccactggcaggtggttggccatctttgccccagcatttataaggagttgcacctatttgcagaaagctaaatcaagacagatgttaacttccatagggagtgttatcaagctaaagaaggcatttctttgttacttacgtttagtaaggttaactgatgagtttagcagagcttggcatttgtttttgacagagtgttcctatcctctctcagctggtatgcctccaaatgagaggcaacttcatttcccatttgtgactacaagggcaaacatgaaagaagtggggtgtgcatgtgtttaagatttggtgggatgagctagtttgaaggaatgtgcgttaccaatcaagataggttagtaatgcctcagtacagacaactcccacatctgagtgacttgtaaaaccaatgggtttaatttctaatcattctacatgtacattgatgtttagcaggggatttggcatatcagaattacttggggattcaggccaagggattgctgccattatgaatgttgctagtcactaggaggaaaagagagcttggaatgatctcacacctttaaatgctgcagcctagaagtaataaacattacttctactcatctcataacaactcattggtcaaaactagttacatggccctatccaatcataagggagccaggaagtttagtccattttttgttcataattggagagcaagaggggccagaaatattgaccaaatgactaccacattcccaaaacaagaaaacttagggaacacttctgcaaacagttggttgtagaccgttgagactgctcatttacttcattttctgtttctcatttagagaaccttattttaagctagggaaaaagtagactcaaaggttgccaggagtccaataagaatttaaatggttacccgcagctacaacagtgaactccttaagttatgatagtcactgctcttattattactggatgtggaacaaggctattgaatatttaagtatttgaatatatttaaatatttcaagttaaaccaaaaaactctcaagacaaagcggtcttttgggattgttttgattgttattgtttgttcataatggatcttagcaattcaggaaagttcagggaaacgtttcagtaaagtcatctcctgtttggttcctctggtctaaaatcagtagtcctaagcaaagcacacggtggtggtggcggcagcagcgacggtggtggtaataactaccatttatccaacttcatcctgtggttcttatgtgccaggtattgtgctaaatactttatgtggattgtatcatttaatccagacacagggttgtgagagtaataggtgctgttatccctattttgctgataaagaaacagtcttatgtagctagtagggcagaaccaggattcaaatccaaggagtttgactccctaccttattcttctaaacactactctattctattttgatttgggtcctgagcatacccttctttgtcttcctcttcagcttgatgtagttttagagaccaatctggcaacaatccgggttctggaagcaatacagaagaagctttcccgcttgtctgctgaagaacaagccaaatttcgcttggacaacacccttgggggcacatcagaagtcatccatagaaaagcactccagaggatatatgctgataaagcagctgacatcattgatggtctgagaaagaatccctccattgctgttccaattgtccttaaaaggtacatgagcaaatgtgcccttagtgctttagtgtacttcactaccggttcagtgtctcattaaataaggctctcattttcaacctggttgtcccatgagacctctctttctccccaaccctggttgttggaattcaggtgcagaatggaacttcttttgggggtcctgtgtaaccaacattagagaacaaatcttgtaagttcatggtggaaggctctgtgtgtatgtttgggggagtattttaaaatacagaaaagaaaagaagataattaccacccatgttcctgccacactcaggactaactgttgttaacatctttgtggtttgtttgtttttgttttgttttgttttgagacaagatctcactctttcacccaggctggagtgcagtagtgtgaacacagctcactgcagcctcaacttcccaggctcaggtgatcctcccacctcagcctcccgaatagctgggactacaggaatgtgccaccacacccagctaatttttattttattttttttaatagagatgaggtcttgctatatttcccaggctggcctctaactcctgggctcaagcaatcctcctgccttggcctccccaaagtgctggcattacaggcacaagccacaccacacccagccccatgtcattattgaccacactgtgaatcctttgttaggagcttggttctctctcagtatcatctggtaaaaattaattcttatttgctgcacagttcacaaatacccagatttgatttgtcctccctcatcttcccctcaagagctggcacagattgatggtttcttctccctcatcttcccctcaagagctggcacagattgatggtttcttcttcttgcctgtagcatttaacttctggcttttgagatacaggttattcttcagttttagtgcttttttttgtcttagtctgttctcttctgggttattagaatcagttctgatcagaactttcctgactgtatccagaggaacataactgtgcaagttctcttgtcttggacttctgtgtttctattagcattgtgaacgttttgcaaagtcctatagcaaagaaacaagaactctttttttcaaggaatacttatacctgaaagatattccctggaatgctgtttttaagtaaccattctaggtaaattatttgactttgagataaatcatttcctcaaagtaagtcttggatgagtaattccctcatgaaacagagttcaagactggtttgatagcatcccaagttgccagtaattttgagagacctaatatagctttgcacctttctttaactaaagtaagcctggcaaatttctttcttctaaaccctctgaattcccatgtgttgtttccatcccttcccgcttcactaggttgaagatgaaagaggaagaatggcgagaagctcagagaggctttaacaaagtatggcgagaacaaaatgagaaatactacttgaagtctctggaccaccaggggatcaactttaaacagaatgacaccaaggtcctgaggtctaagagcttactcaatgagattgagagtatctatgatgaggtgagcggggggtttctgcatctgtgagaggactctagtctatatttagcacagctttgatttctggaaattacctttgttaaatgcaggtgagactctctaagacctgttgattcttgcttgatagctgtcatagccttttctattcctcattctaccattttaaatctaaactatacctttatacctaagctgtttgactagtttcctagtttactgtcctggtttcaacttatacctcctgcctccattttccacttctccgactacctgtttccttcaaacaataataccttgtatccatatagtcccatctctccttacttacagcttcaaaatttgtcattgaccaccaaactctttgtaatccttgcttattcagcatgcctaccaggactataaatagtactaggagctaggatcagagatgaataagcaataaatcctggtttccgtgggctcagttttaggagatggatagaaacataaatgcagtgcaattgggaattcctggagtggggtgatcctgaactttaaaaatagtaaaatgagctcttatgtgaacttaatcaggccgggcacagtggctcatgcctgtaatcccagcactttgggaggctgaggcgggcagatcacctgaggtcaggagttagagaccagcccagccaacatgacgaaaccccgtctttactaaaaatacaaaaattagccaggcgtggtggtgtgcacctgtagtcccagctactcggcagaatgaggtgggagaatggcttgaacctgggaggtggaggatgcagtgagctgagaacatgccactgcactccagtctgggtgacagagcaagattccgtctcaaaatcaataaaataaataaacttaatcctccatattttgctgatgttactttgtcaccctccatacccccaccccagaagtaacgtaaatcacagatctcatatcatatcctttatatagatactaatccagaattttgaaagatagtcccactgggcacagtggctcacgcctgtaatcccatcactttgggaggctgaggtggacagataacttgaggccagaagttcgaaaccagcctggccgacatggtgaaacctcatctctactaaaaaatacaaaattagcnnnnnnnnnnnnnnnnnnnnnnnnnnnnnnnnnnnnnnnnnnnnnnnnnnnnnnnnnnnnnnnnnnnnnnnnnnnnnnnnnnnnnnnnnnnnnnnnnnnnnnnnnnnnnnnnnnnnnnnnnnnnnnnnnnnnnnnnnnnnnnnnnnnnnnnnnnnnnnnnnnnnnnnnnnnnnnnnnnnnnnnnnnnnnnnnnnnnnnnnnnnnnnnnnnnnnnnnnnnnnnnnnnnnnnnnnnnnnnnnnnnnnnnnnnnnnnnnnnnnnnnnnnnnnnnnnnnnnnnnnnnnnnnnnnnnnnnnnnnnnnnnnnnnnnnnnnnnnnnnnnnnnnnnnnnnnnnnnnnnnnnnnnnnnnnnnnnnnnnnnnnnnnttacaatgagccaagattgctccactgcactccagcctgggtgacagagcaagaccctgccaaaaaaaagaaagaaagatggttccaattctgtcctactctccctgtaagtcatcagtgtgtagaaggtacctgtattttgacatcaaaccacgtctctgtcattacctatttgtttctggaagagggacaaaaattattgttatagtcaggtcctaagttttgttttgagacagagtctcactctgttgcccaggctggagtgcagtagtacgatctcggctcactgcaacctttgcctcacgggttcaagtgattctcttgccttagcatcccaagggctgggattacaggcacctaccaccatgttcagctaattttgttatttttagtagaggcggggtttcaccatattggccaggctgatctcaaactcctgacctcaagtgatcaccctcctcggcctaccaaagtgctgggattatagacgtgagccaccgctcccagtcccaggtcctaagtttttgattagaaaaatatagacactgtggttgataatggggatgtatggctgatgtggtcttgtagacattgttgtcgctgtagacatctcacagaatacttttgtgtctctgtcccatcagaggcaagagcaggctacggaggagaatgctggtgtacctgttggcccacacctctcacttgcgtatgaagacaaacaaatactggaagatgctgctgctctgattatccaccatgtgaagaggcagacaggcattcagaaggaggacaaatataagataaaacaaatcatgcatcattttattccagatttgctctttgcccaaagaggtgatctctcagatgtggaggaagaggaagaagaagagatggatgtagatgaagccacaggggcagttaagaagcacaatggtgttgggggcagtccccctaagtccaagttactgtttagtaacacagcagctcaaaaattaagaggaatggatgaagtatacaacctcttctatgtcaacaacaactggtatatttttatgcgactgcaccagattctctgcctgaggctgctacggatttgttcccaagccgaacggcaaattgaagaagaaaaccgagagagagaatgggaacgggaagtgctgggcataaagcgagacaagagtgacagccctgccattcagctacgtctcaaagaacctagtgagtgccgagacctctgatttacagaggatgtgtgaggttgaggaccttagagccacctagacttgggactgcttcttttattaatagagcacaggcattagagtctgtgtagttaaactctctgaacctgtttatctgaaaaatggaggctctagttgcttgtggtgttgctttgtgcaaagtatcctatgcagggcttagatcatggacacttggtcagtggttggtactgtggacgcacctgggaagggggtatcacagttaatttctcaaatggcagatttctgggttactgccatctgtttcaaagtacagatagagactaaactgtcacagccaatttcaatccatgacagaacataaattcctagtgcttaaaacagaattttctcatatttttgagcaggacttctgtttaaccagtggggtttatggctcattcttaatatgtagaaatagtttatggaaaggagactggaactcaaaaggtgatacgagacatggagaacaggcaggacagggataaagatgtagaactcaggaaaaggaaagtaagtgagggttcaggacgctgtcatgtgctttatgtaattttgtgctgcctgcttccagttcacgtcataaattaggtacttgagctgtgagccaaaagctttttcatgaagcatttcttctgggctcttaaggaaatagccaacctgaggagtgtatcttcttcttcttttttttttttttttatgtgttgctgatgtaggaagcccagatatggccctagctttctatctgttgaggagctaatgacactgaaaaataattctgaaagcttttatctagactagtcctagctcgaaagagataaattttagatctcattgtggtgattccatctacttgggtagaaattagaaattaaatggcctattcctggcttggccactgacttaacctggtttgaggcttacataatgttgtcttgtctgataatgccaaccctcacacttaccacagcttgtttggacaaatctgtggtttggactcaaaactttattctggcataaaagcagttttcatagcagtggtatattttggagtctatagcctatacctattctatggagctaaagaatgtgatagtctgtgatgaaactcaagccagttgcctcttttaaacagtatttgtcctgttttgcctgttttttaatgaattcgtcagacttcagataaatggagacaacttggttttgctcctagccttttttctccagcacaaacacaactagcaagtaaccaattagtcagtgacaaatagttcgttttgtaacttttttcattttagtcaactttttgttgaagtgcaatgtataggccgggtgcagtggcttacacctgtaatcccagcactttgggaggccgatgtgggaggatcacttgaggccaggagtttgagaccagcctggttaataagtgagaccccatctctacaaaaaaatacatataaggtacggcatgtatatatagaaaagtatacaaatcagaattgtgcagctcagtgaatttttacagactagacgtacctatgttcaagaaacgaaacataaccagtactctgataaccagtcctttttccactttgttgatttctaacactagagattagatttgtctatttttgaactttatataaatgggtctttagtaagctaaaggcagcactctttaatactccttgtgccctctgctagttgccaaatgtctttaacaactgatgagatttattctagctagtgattgaaatgattcatgtgcagcaactacagatgatttaatgcaatttgtgaaatacaacgtagcgaatccatttttaaacaaaaggactttgacaaatgcagattacttcattattcataaaggatttaatttgcactcctatttttgtgttcccaagaggtttcccagtgctggagtatggctgtgtctgcctttcctcatctgtactttatgcttcattgaaatagctttatgagcaagtgacccatgtgaggaatgctcttgtgcaggctgggagagtaggttcctctctcagcaggggagccaacagctctttgaaggactggcttccctaggatattttcctctctgaaagtggcccagcagtaccataaagaagtatctttctagcatggtagtcagaatattagaagccactgttaaagttgcagagtcactctgatagtgctggtgattgtagtcacctgtcggaattcatctctgtttacattggaatgagtgagtatattttgaatacctagtgttcatactttcaaatgccatttaggccagctgtgggatttgccctgtactctatccctagtcttttcttagcaaggtaaggcctcaccaatcccatctctcccacagtggatgttgatgtagaagattattacccagctttcctggacatggtgcggagcctgctggatggcaacatagactcatcacagtatgaagattcactgagagagatgttcaccattcatgcctacattgcctttaccatggacaaactgatccagagcattgtcagacaggtgagggcatggaggaggctagggtgagtaagggaagaaatccttacctagagatgggccacgcaaggaaaaggaaaggcaactttttcatataacagtgtttatgaacgtagggttctgaagagaggaggggaggttaatgtgatgcctgatttctcatgttaacaaagttgcagtgtatgagcctgcctaccccatatcctttcttgctggccacctgtagagtgcagtggtcctgaccccagcttcctgcacaacttgtctatctcttaccttgtctgccatgggtaagcacacagtgtggaacattgcgtcttccataggtgttggtaagtttttttttttttccttaaatagagacagggtgtcactgttttgcccaggctggtcttgaacttctggtctcaagtgatcctcctgtcttggcctcttaaagcgctgggattatagacacgagccactgcgcctggtcaaggtgttggtaactcttatgtacttgcattgtttaatatttgaaattctttttataagaaagggttcacataacatcttttataatactctgcccacctcactcatctgcggttccctctaagttaggtttctggttggttttgtgtgttcttcctgtggcaccctgggaacttgtaaacatgttgttctttacaacaatgatataaaaaatagcttgtaacagatagtcacatttctacttcttggacttgagttctgaactcccagagagattgttggttaactgcttttttctttttctggagacccagctctactgctgattgactgcaagtccccagcagggcttcatttttccttttcagcatcctgttctgtggctcccttggccctttttgcccatatgccaaagagctgaaaattgatgtgggctgtgtgaagactggcaaataccttaaagttcttagtgatgattccagctttctccttcttatagacgtactatatgggcattattcgtcctgtcagctgggtggctgatttgagtttttcagaactgtctcccttcttgggggctaagagcttcctggagaagaggttgagcttggagtcttaactccttcaggtgctgaacattggcccacagggacatggtgtactaatgccaccctcttgtggatgctggtcacccttaactcttctaagctgaagcccctgccagcttgtactttggtgtggtacctcactgtggggcagcttaccatgggtcagatgggtccagatgcagggtgcaggtcaatgtggtatacttttgcttgcatctgcagatcttctgggctggctggttgaaccacgtggccatgggccactgcgattccttgtggaagtagggctttaggatcatgctgttccacctgggtaccgtggctacctacagccctcttccatagaatagctcagcagaaaggcggtgaagtacttaagtgaaaacttgtaaaaagcaatttctaattctagaatccacactgccactgtagaaggaaagagcttgttgcttaatgttctcttgggctaaaatattgaattctttgcaaagtacccatgcttttgccttggttttggaagggtgcatgcctctgtactcctcccacagtatctacacaggattgaggaagagcccttcatataaatgaaccttaacatctgggggaaagttgtcagatagttgtttccaataagttgaagaagttgttaggccttcccataagaggtctggatggtaactggcagaaatcattagatggatacatagtcacccatagtcatactttttcagactaatcttccttaacttccctgaaatttatataaaatacagactccagttaccctgtgcttatgttgctgattacaggcttgctgctgcttcagctaggaacgaagtctttcataccaccagcacagcttaaaaaaaaaatccaataaaactaacttttaataattctgaggttggttttcgaaacaatagttacaattatttactgtatctggttatgattttgaatcagtaataaatactatctccacccaccccccgcttttttttttttttttaatggaaacaggtttcatccagaaaaccccaaaacagtgactttttttttttttttttccaacccagggtctcactctattgcccaggctggagtgcagtggtgtgatcagctcactgtagccttgacctcctacctcagcctcccaagtagctgggaccaaaggggccaccacaccggctaatttattgtattttttgtagagatggagttttgccatgttgtccaggctggcctcaaacttatgggctcaagcaattcacctacttcagcctcccaaagcgctgcgattacgggcatgagccactgtgcccagcctacagtgactttttaaaacattttcaagcttctcaactcctttaactggaggtatctcttctctcattctcctcatatttggtgttccctcagattccactgctgactgaatgtacaacatatatttcaaagtcaaggctggtcatggtggctcatgcctctaataccagcactttgggagtccaaggcgggcagatatattgagtccaggagttggagaccagcctgggcaacatggggaaacactatttgtattaaaaatacaaaaaattagctgggcatggtggcacatgcctgtagtcccagctactcaggaggctaaggtgggaggatcatctgaacccaggaagttgaggctgcagtgagccgtgattgcaccactgcattccagccaagtgaagccattacatttatcttacctattgtaggctggcttaagagggatttgtattaagaatacaataggcaacctcacagacatccaagtacagaactcaaaataggaccacaccatggaaggattgggctgggaggtgatttttctctcctgcatgccttcactctggacttctgctccatgcttgtgctttgctctgcagatgaacatacggcatgtgctccaggctcctccagcctctgaggctttggcttgccctcccagtacccctggtcccagtgttactagacctttccatacagatgctcctcctcaaaaaatctattgaacaccctctctgtcatctccaattagcaagatagagaatctgatctgcttagcagtgggggtgggagttccgtagctgtctctggatttgtagtgctgtcttttctgaagactcgaggaggggccagatatccaaaaagagagtatgggtggggaatcagtaatacagtctacttcaacaagaaagtataaagtagaggcggtggctcacgcctgtaatcccagcagtttgggaggccaaggcgggtggatcacttgagctcagaagtttgagatcagactgggcaacatggcaaaaccccgtctcttctgaaaatacaaaaaagttagctgggcgtggtggcacatgcctgtagacccagctacttaagaggctgaggtatgggagggttgcttgagcccaggaagttgaggctgcactgagccaagatcacgatgccactgcactccagcctgggcgacagagcgagactctgtctcaaaaagaaagtagaaagtggaagcatctgtatgtatgattgaagtcatgctttccatctgtttttttccaccttttcttttttctcctaaaacactgtatcttaatcttcctcatgatatcaggtactcataagcattattttaatggttgtatcagaatcctttatctggactcattgtgatttatttatccatctgtagttgctggagatactgccctttctgccacactcagtcaccgttctgacctttcactgtgtccagttatctactaatacacatactggtcatttaggacttaagaataaatagttatcatggttcctaacacttaaaaagaatgtgtcttcctaaaaatagaatggcttggtggttatgatcatcttaaagttttttaaacagacaaatcaatattgaaattaacgttttgctttcttcttgtatctatttttcacttctgtcattttgatgataaagtttcatttggaaggatttttatttcaaaatagaaatagcatgacatgagaatgggaactctgaaacgttcaactttctagtcattagtttcctaagattgtcacaaaagctactgatagtcaatcatgattggcctgtatggaaagtgagttaactttatgtacaacttaagccctatactttctatcagatacagaaaaataggtgatgtgtttggaaaagtattgggctaggagtcaggaaccttgacttttagtcccaaccctccttcttcagctgagcacccctgggcaataattcagcagctatttcttaaatacttaatgagtttcaggctttgtagttggcctgggaatatagacatagatactgcattcatgattctccaaggctcccttcctcaccccagctcacggtgagctttgcagtggtgcagtctcggctcactgcaacctccatctcccaggttcaagcgattctcctgccccagcctcccaagtagctgggattacaggctcctgccaccacgcccggctatttgtgtatttttagtagagatggggtttcgccatgttagccaggctggttttgaacacctgannnnnnnnnnnnnnnnnnnnnnnnnnnnnnnnnnnnnnnnnnnnnnnnnnnnnnnnnnnnnnnnnnnnnnnnnnnnnnnnnnnnnnnnnnnnnnnnnnnnnnnnnnnnnnnnnnnnnnnnnnnnnnnnnnnnnnnnnnnnnnnnnnnnnnnnnnnnnnnnnnnnnnnnnnnnnnnnnnnnnnnnnnnnnnnnnnnnnnnnnnnnnnnnnnnnnnnnnnnnnnnnnnnnnnnnnnnnnnnnnnnnnnnnnnnnnnnnnnnnnnnnnnnnnnnnnnnnnnnnnnnnnnnnnnnnnnnnnnnnnnnnnnnnnnnnnnnnnnnnnnnnnnnnnnnnnnnnnnnnnnnnnnnnnnnnnnnnnnnnnnnnnnnnnnnnnnnnnnnnnnnnnnnnnnnnnnnnnnnnnnnnnnnnnnnnnnnnnnnnnnnnnnnnnnnnnnnnnnnnnnnnnnnnnnnnnnnnnnnnnnnnnnnnnnnnnnnnnnnnnnnnnnnnnnnnnnnnnnnnnnnnnnnnnnnnnnnnnnnnnnnnnnnnnnnnnnnnnnnnnnnnnnnnnnnnnnnnnnnnnnnnnnnnnnnnnnnnnnnnnnnnnnnnnnnnnnnnnnnnnnnnnnnnnnnnnnnnnnnnnnnnnnnnnnnnnnnnnnnnnnnnnnnnnnnnnnnnnnnnnnnnnnnnnnnnnnnnnnnnnnnnnnnnnnnnnnnnnnnnnnnnnnnnnnnnnnnnnnnnnnnnnnnnnnnnnnnnnnnnnnnnnnnnnnnnnnnnnnnnnnnnnnnnnnnnnnnnnnnnnnnnnnnnnnnnnnnnnnnnnnnnnnnnnnnnnnnnnnnnnnnnnnnnnnnnnnnnnnnnnnnnnnnnnnnnnnnnnnnnnnnnnnnnnnnnnnnnnnnnnnnnnnnnnnnnnnnnnnnnnnnnnnnnnnnnnnnnnnnnnnnnnnnnnnnnnnnnnnnnnnnnnnnnnnnnnnnnnnnnnnnnnnnnnnnnnnnnnnnnnnnnnnnnnnnnnnnnnnnnnnnnnnnnnnnnnnnnnnnnnnnnnnnnnnnnnnnnnnnnnnnnnnnnnnnnnnnnnnnnnnnnnnnnnnnnnnnnnnnnnnnnnnnnnnnnnnnnnnnnnnnnnnnnnnnnnnnnnnnnnnnnnnnnnnnnnnnnnnnnnnnnnnnnnnnnnnnnnnnnnnnnnnnnnnnnnnnnnnnnnnnnnnnnnnnnnnnnnnnnnnnnnnnnnnnnnnnnnnnnnnnnnnnnnnnnnnnnnnnnnnnnnnnnnnnnnnnnnnnnnnnnnnnnnnnnnnnnnnnnnnnnnnnnnnnnnnnnnnnnnnnnnnnnnnnnnnnnnnnnnnnnnnnnnnnnnnnnnnnnnnnnnnnnnnnnnnnnnnnnnnnnnnnnnnnnnnnnnnnnnnnnnnnnnnnnnnnnnnnnnnnnnnnnnnnnnnnnnnnnnnnnnnnnnnnnnnnnnnnnnnnnnnnnnnnnnnnnnnnnnnnnnnnnnnnnnnnnnnnnnnnnnnnnnnnnnnnnnnnnnnnnnnnnnnnnnnnnnnnnnnnnnnnnnnnnnnnnnnnnnnnnnnnnnnnnnnnnnnnnnnnnnnnnnnnnnnnnnnnnnnnnnnnnnnnnnnnnnnnnnnnnnnnnnnnnnnnnnnnnnnnnnnnnnnnnnnnnnnnnnnnnnnnnnnnnnnnnnnnnnnnnnnnnnnnnnnnnnnnnnnnnnnnnnnnnnnnnnnnnnnnnnnnnnnnnnnnnnnnnnnnnnnnnnnnnnnnnnnnnnnnnnnnnnnnnnnnnnnnnnnnnnnnnnnnnnnnnnnnnnnnnnnnnnnnnnnnnnnnnnnnnnnnnnnnnnnnnnnnnnnnnnnnnnnnnnnnnnnnnnnnnnnnnnnnnnnnnnnnnnnnnnnnnnnnnnnnnnnnnnnnnnnnnnnnnnnnnnnnnnnnnnnnnnnnnnnnnnnnnnnnnnnnnnnnnnnnnnnnnnnnnnnnnnnnnnnnnnnnnnnnnnnnnnnnnnnnnnnnnnnnnnnnnnnnnnnnnnnnnnnnnnnnnnnnnnnnnnnnnnnnnnnnnnnnnnnnnnnnnnnnnnnnnnnnnnnnnnnnnnnnnnnnnnnnnnnnnnnnnnnnnnnnnnnnnnnnnnnnnnnnnnnnnnnnnnnnnnnnnnnnnnnnnnnnnnnnnnnnnnnnnnnnnnnnnnnnnnnnnnnnnnnnnnnnnnnnnnnnnnnnnnnnnnnnnnnnnnnnnnnnnnnnnnnnnnnnnnnnnnnnnnnnnnnnnnnnnnnnnnnnnnnnnnnnnnnnnnnnnnnnnnnnnnnnnnnnnnnnnnnnnnnnnnnnnnnnnnnnnnnnnnnnnnnnnnnnnnnnnnnnnnnnnnnnnnnnnnnnnnnnnnnnnnnnnnnnnnnnnnnnnnnnnnnnnnnnnnnnnnnnnnnnnnnnnnnnnnnnnnnnnnnnnnnnntttgatattcactttttagagaattaatgcctgtattggtggacatttaggttgtttccaatttttcaccattataatggataattataaaagcaaatagttggaaacatcctagacgtccaacccactatggggactggttaatgacatcctgttatgaatactggagacagattttgcaattcttaaattataaattgtgaaaatgcagggtctgcccccaccccgaaatctattttggaaataactgtatttgtgtgtgtatatattatgttattgtcaggttgtaagctttactagcagagagcaatttttaaagctttaaaagaacactgagctagatctagcttctggctctgcatgtatattgattagtggtgtgccttgagaaaccagaactcttctgaatttcagttttgtctctgtgtaaaatgaagaaggttgaaataaaaaattctcaggtttccttccaggctctgaccttctccatgtgattctgatagttacctcctctattacgtcctagaagtgggattaccaatggacagagcattgacattttgtggttctggctacatgtgccatatttctttctgacaaaatatttgttttgtaaaacattcttactgacattgattattattttagcgaattctagaagtttgaaacatgaaatagtaccttttgctttaatatatttcattttacttgtagtaagtgtagacttttgcctttatcactggccacccaagatctagtatcttcctcatctcttcagttggagcaaagtttactaagtttattgcctctgcacctctcattccttgagaagatagattacagctacagagacggtcttttgtttacgcttaggtttcttatttgcagcttatgtttattcagagccaaggccaggtccagctgactattgagcttctggacacagaagaggagaattcggatgaccctgtggaagcagaggtatgagcaagtacatcacagaccccaggtgccaagcagagctggcgtgccttgagagtctgtccagtgaccctgtctgccaaaaggccaaggcacctcaggcctgtttaagggtcaggacctggatgcttaaagtacaagtcaatccagccatgtcttcagctgaagagacgggctgcctggttatagatgttaacctcatcttgcacttagtaaagctatctcctctaaggaagtcttatggttggcagctttcctgttttttcctaaagtataaaaaacaacaaatgaggtctttctcatgtcatcttgattctttgtgtcatgtttactttttattggactgataaagtccagagttttcaacccctgaatagacaggtgtgattatcatagttggttatggcagataatgtacacaggagatgcaggccatatgtatgatgttggggggggtcgtgtgggatgacttgttttggtgggaatgttggcttgttggcagatctttttttttttttttttttttaagcgatgtcagaaatctagattgtaatgtgaaggaaactttcacacatttgccactataaattttgttctttaacaaaatgctctgtggggaaatgaaacttgtcagtgagccagcttctacctgtttatgacttctcataaccttagcacctcagaaacttagcagtattgctggctaacagaatttttaatccgtgttccaatacctactaacaatcatgtctttatagaaagggacttttttgatcttgaaatttatgaattcggggcattgtaatcatagaatttactagagtgcccaatgcattaggagctgtttttgtgatttccttccacctgtattttgtgtttgccatcttagcgctggtcagactacgtggagcgatacatgaattcagatactacctcgcctgagcttcgtgaacatctagcacagaaaccagtatttctccccaggtgagtgagccatgtcatctgtcagcagtccatactgtgcatgattgaggaatggagagttaaatgactttcacgttcttggccttcacatattttattcatttgttctatctgctggggatgctaattcaaggttttatatggctgtcacaacatgagcttacctggagcatgtgtcaaagcatctgggaggtgagagttgtagagaatcaacaataacctccgtactttggatgggaatgtgtgtcagagtctccatggttcgatggaagaggactcacaggactctgcatatagtcagactgatttagtacagcgagaagatgcaaagcagaatcagcaaagcgaaaaggtgcctgtggcaaagctggaggaagccaggctcaagcttcctagaatcctctcccagtggagtcacacaggacactcttaattcttccaacaatgaatgtgacaacacatgcaaaatgctgtctaccagggcagctcattagagactctgtgccaggatttttattgagatgtagtcatctaggcactgtatgcctagcatgtaccaaaatcccaaactctcagaaagaaagcacattttcagcataagctatagagtttgtacaaatagtttaggtacagtgagacacttatatgagttaaggaatggtagaacattgcccaaaatccaagatcccagcccccagccaagggccaacttttataagcaggcttttcaaagaatagcaatcttaggcctgctacattaactcttttctgcacagaattttaaaaatgttccctctgtgtataggcagattgtgatactgatcctccaagtatatgaaaacagtttaagaagtataaaatgggtagaatggctttcttccttcctaaaagttttgaattgaaatcttatgtcttaggtttccaagaaagtatcatcccagtgttattagacttattgagtcctaatgagaacatgggaaaagagataccagcaaaaagggccctgccgggttctccattcattgaatcatttaacacatttgagcagttgctctgtgtcaggttcctctcaacaaaacaggctccatgctaataacatactacaataaacctgtcatcatgtgtctctcaccatgatatgaggaaggaggcacatttatgtactgtgaggaaaaggaaattgatataatcgttctggtggcagggtagttgaagtgtatggaatcttccctccagaatttcagtttctaatgatttgtctgacagctaaggggctcatcttattggccttgagaccccttacactcttagagcatgagtactccaaaaagcttttgtttatatggattatactagtaatatttaccaagttagaaataaaaacaaagaaatgttttcaatctttaattcatttgaaaaataacaatattgggctgggcgcagtggctcacgcctgtaactccagcactttgggaggccgaggctgtggatcacgagatcaggagatcgagaccatcctggctaacacagtgaaaccctgtctctactaaaaatacagaaaattagctgggcatggtggcaggcgcctgtagtccaagctactcgggaggctgaggcaggagaattgcttgaaccggaaggcggaggttgcagtgagtggagatcgcaccacggcactccagcctgggtgaccgagtgagactctgcctcaaaaataaaatatatatatatatatatatatccctattatattttcttaaataatattttttaatgaaaagctaattcaaaacaaaaattagtgaatagagtggcattgcttatattttataaatttgtttagtgtctggcttaccagaagaacagctggattctcatgtctgcttctatattcaatctgttgcattatgtatgttgtttgattgaaatatgtgaagaaaatctggcctcacgcaaatgtgtagctggaaaaaggaatattttcagatccttcagataactggatattctttgatatgacaacaaaactaccagtgatagtttttgtttttgtttttcttttttgagacggaatttcgctcttgttgcccaggctggagtgcaatggtgtgatctcagctcactgcaacccctgcctcccaggtttaagtgattctcctgcctcagcctcccgagtagctgggattacaggcatgtgccaccacgcccggctgattctgtatttttagtagagatgggatttctccatgttggtctggctggtcttgaactcctgacctcaggtgatcctcccacctcggcctcccaaagtgctgtgattacgggtgtgagccactgcacccggccccagtgatagtttcttaaaggttagttggaatatcaatttatacatcagtgggcttttcatgcagttgtaaaaatccattgatttattttgtatcatgaatgaatctttttttcctctatgattttgtaactttacgcaattggctatttggaaaataagttatacacacctactaaatgttgatatattttacagtgtctccaaaagaaatcacattgatttaatatcgctatcgctaggtcatcaaacacatctttaagtattgggaagctgtcaagctcagggtggctgataccagttcaccaaaattcatagttttgcttgaaaattccagtcttaccattggcaacattgttttccttgaagtgataggctcccttgttcatttttgagaaaacatctgccaaatacttggctgagattgactatatttagtcagttgttctttcgggtaaaaatgatgatccacttacaactcaagcaattgctcaagtgcttttctataagaataccattgtactttagcacacaaaggtgctttatgtgtagttcccattttatcacacagcatgttaaaaagatgtaaattgaggggttgggatttaatagaaaatgttactgcttcatcagaaactttttttttctttttttttttttgaggcagagtctcactctgttgcccaagctggagtgcagtggcgcgatcttggcttactgcagcctccaccagccaggttcaagtgattctcctgtctcaccctcccgaatagctgggattacaggtgcgcgccaccactcccggctaatttttgtacttttattagagatgaggtctccccatgttggccaggctagtctcaaactcctgacctcaagtgatctgcctgcctcagcctcccagagtgctgggattacaagcatgagccactgtgactggcccatcagaaacattcttaagtgaaactggcttttttcacttaatgtcattgtatggtcagtgtgaagttcaaagacttgaattgcagtcgcatgaaggtgcaaaatcatggaagtaaaatggattcattgatggtacaagataaaccaacagagtttgacaactgtatgaaaagctcagtgatgtacaaattgatattggaatttggtaacaatttgttcgatattgcaaatacagtttggcgccaccaccagcatttttgttcaccattactttaatggtgccagtgcagatgtcaacacagcaaaaaagggaaataatgttttagtattattatgagaatagttttgatctcacagatctcctgaaagggtcctgggaccctttggacaaagaactgctgtctacagaaatacttgtatacaaagattctcactgaagcaatattttgggctggttggtttttttttttttttttttttttaagacagtgtctggctctgtgtcccaggctatagtacagtggtgggatcttggctttctgcaacctccgccttctgggctcaaacgatcttcccacctcagcctcccaagtagctgagactctaggcacacgtcaccacacctgcctaattttttttttttttttgtagagaaggggtttttgccatgttgcccaggctagtctcaaactcctgagctcaagcaatccacctgcctcccaaagtgctgggattataggcatgagccacagtggccaacctgaagcagtgtttttaatagcaagttatgagaaacaatataattgtctagctgataacttttttcactggatgttgagatttagcaagcctaccacccctcagggcatccattcatgtgaattatcttctttcttgtgtatgtagaatggcactagtttatatcatctgggggaatttttaaaaatagtcattcaaataaatttttgttatgtggttcagatgaggaacctcagttgaaagaaactgttaaggaatggtaaattggggtacatttttctgcagcagttaaagagaataagacaaatctatcatgaaatgaaaaaatattcatgacagtaagtgaaaagttgaggacaaaatatatagtatgatcctattttgtcttaaaaacaaatcccaaagcagaactgtagctggtaattacatgtgtaaatttacagacagaggcctagaagtttctcattaaaactcttaactggctacatctgctaagtcaagtaggggatgggtgaagatttctgctttttattctgtgtacctttgcagttgaaattttttttgcagtgaaacaactgaacatttgtgtatgtatttaacaaattgggatgagtactatgcaagcatataataaagaaaactcactttggggaagtcacgggaatctgcatctggacgagctctcatcctccggggcttttctgcaataggaatctacggcggatccggaagtgtcaacgtggtcgagagcagcaggaaaaggaagggaaggaaggaaacagcaagaagaccatggagaatgtggatagtctggataagctggagtgtagattcaagctgaattcctacaagatggtgtatgtgatcaaatcagaggactatatgtatcggaggaccgccctgctccgggctcatcaggtgagaaccagtaactgaaatttctgtacacatctcccaccctagctaggaccaggggaggcccagagtcttctgattgtttttctttgtttatgcaaacctgttcttggagctgagacttaactgaggaagtacgtatgttggttgctaaggatgctgtgacaaagtaccacagactgtggcttaaatgacaaaagttgtggagactagaagtccaaagtcaagtgtcagcagtgttggttccttttgaggactgtgagggacaatctcttctaggcctctcctagcttctggttctttgctggcaatctttggcattcctgggcttgtagatccctgccttcatcttcatatggtgttcctacctgtgtgtgtgtgtctgcctccagatgaggtcacattcggaagtactgggggctaggacttcaatgtatgattttttgtttgtttgtttgagacagagtctcacctgacacagcctctcaaagtgctagcattacaggcgtgagccaccatgcccggccaacataagaattttaaggagaatacagttcagcctgtaagagcacgtaaatacccggtggcacctttttggtgaatttactcccagtatttacatctcaagtagtatctgatcttttgcttgtatgaatcctacctgtctttacattctgtctcaattgtgaaaccttcctggtgcagctgcgtatagggtgttatgccaggccctgggactacagccatgaagtagagcagatgaagtaatgcgatgatatgcactaccagggaaacaaatcaggtgaagtgatcaagggtaactagcatacaggccttgctttcactggaggaggcttctcaaaggaggtgatgcttgaggcctgaataatgacaaggaattagcctggtgaagagtagaggatgggtgttttctagacaaaagagctagtacaaggctgggaggaaaggacttggcatattcaagaaattacaaacaccattgtggctcaaggttgcatgaagttagaagggtaggcagaggccacatcactttgtctaatgataggccatggtttgtaatttgtttgagatgcactgggacatttgacaaagatagcttggagttctgtgaggacagtggagatgggtatatataaagttggaagagcagagaccactcaaaagggtgcccttgtccaaatgagatgtgggggccacccgtactactagggtggcagtggaattgcaagaattacattgtagactttatgcatttatttttgagacagagtttcgctgtgtctcaaaccatgcctggctgattttttgtatttttagtagagatgggatttcaccatgttggccaggctggtctcgaacctgacctcaagtgatccaccctcctcagcctcccaaagtactgggattacaggcgtgagccaccacgcccagatgtagatattatttagatatttaattgacaagagatggtgttggatcaaatgtgggggtaagcaaaagaaggacatcaaggatggtgcctgattagttttggggttttttggtttgttttgttttgcttaagtggagattttaggggctcacctgttaataggaaagggttatgaggtttgggagacagatgaagtgctgttttaagtttgaaaggactacaaaactttcaaatgggagatgttgagcagacagtttaatgtataattaaccctttaacgacaaggggtttggggcactggcccctgcacagtcaaatctgtgtataatttttgactcccccaaaatggaactactgatagtctactactgactggaaggcttactgataaacaacatattttgtatgttgtatgtattatatatactgcattctttttttctttcttttttttttttttaatgaaaatagacacggggtctccttacgttgcccagggctggtctcaaactcaagggttcaaacaacccacccatttcagcctcctaaagtgctgggattacaggcgtgagccactgtgcccagcctatactgtatattcttacaataaagtaagttagagaaaagaaaatgttaagtcataagcaagagaagatacatttactcttcattaagtggttgtggctcatcataaagggtccttattctcatcttgttgagtaggctgaagagggaggaggaagggaggggttgtttttgctgtctcagggttggcagaggtggaagaaaacttgcctatcagtggccctgcgctgttcaaagctgtgttgttcaagagtctgctctacttctctcatggcactgagggaagcgcagtggcatgatttcagctcactgcatcctccacttcccgggttcaagagattctcttgtctcagcctctcgagtagctgggattacgggcgtgcaccaccacacctggctcattttttttgctatgtgttgtgtgtctgcctgtctctgattcacattatttgggacactgggcaacaccagttttgtctttgtatctcttctagtatccttgcatgtggacaccaataaatttttattgaatgtgttggtgggaacagaaccccctgcagaacatctgccaagcctggactctgcttcccagggtggggtaacacagtggagggagagtggttttaagccctttgctttgcactgtctggcttagaggtggatctccatgctgatagaagtgatcaatggctcactgggtcctacccaggatacattagaatcagctggattgctggtttaaaatgcacattggtaaaccaaggaaatgtgggttttgggggttttgggttttttttttttttttttttggagacagggtttggctctgtcatctaggctggggtgcggtggtgcgatcttggctcactgcagcctccacctcctggctcaagcgatcctcccacttcagcctaccaagtagctgggactacaggtgtgtgccaccacgcccagttattatttgtatttttgtagagatggggttttgccatgttgcccaggctggtctcaaactcctgagctcaagcgaactgcctgcctcagcctcccagagtactaggattacaggcatgagtcactgcacctggtcagaaatgtgtattttttaacacattccctcggttatactaacgcatgctaaaattgagaacagcgagctttttcagcccagagcctgtgttcgcatttctttggaggctttatggattttcatgccctcacatgttctatgttcttacctctttaacttctctttaaacagagaatccttttttttttcttttaagaaaaaaacagtggtatctaagacttgagcccacatctttcctttgctcctttagaagaaaattaggctttgtatttgaagggctcttttttggttctgcttcatttaataaaattttttttttctgttttgcagtcccatgagcgtgtaagcaagcgtctacatcagagattccaggcctgggtagataaatggaccaaggagcatgtgccccgtgaaatggcagcagagaccagcaagtggctcatgggtgaggggctggagggcctggtgccctgtaccaccacctgtgatacagagaccctgcattttgtgagcattaacaagtatcgtgtcaaatacggcacagtattcaaagccccttaactgcaaagccagagcagataacttggggtgtgtgtggggatgtgtgtgtgggcctatgcactcacacactgaagaaacaaggaagatgcctttcaagcctcactgggcctctctgggacatggccacctgacctgtgtgtggctggtgcagcctggcaccaagtgggctacctgttaggaacatgaataccttacaaagctgaagctggaacttttcccaaagggttttgggtatagcctgccctggaggggaaggaagtccatgcaagcaaagacatgcagtttgcttgcacacaccagcagagctaagactggagtctcctgtggcctaactttcaatgagggaaccggatgctgttcacactttgactggatggagatgcatttacaaaacagactggagaaggacttaatactcagatggattggaactatcatggtcactgctcctctcccctccccacaaaaggaaaaaaaagctggatttgattttttttttctggtcactcgagcacatctaagatcacccattaggttttatctgggacctgcagtttggctttgggattgatcatcttgtggattttattcctgacgattcccttgctgcctacccttttctctcctctggttctcaacctcaacgagttcaaatcagttgtcctttttagctcccgtggaactgttttgtatctgcctctttactagtctaccttagtgccatccaccagctttactctctgacacacacacgcacacacacacacaattttaacttgtttttttgtacataatgtacatactgtcaattttttattaaaagaaatatgctttgatgtgctagcataactgctctagcttcttgtgtaccatagtactgtggcttcagatttagtacctatgaacagatgtacaagacatttattacactttttaccaaagggagttaccattgtagtacttttgtgtaaaacttgtcttcccctttgcccccaactttttttttttttttttgtaaataaataaagcttggttcttacttaaggaataaactctcaacccacgtcccttgtcctcaccagaaaatactgtgaagcagggattttgacttcagttccttatccagggtagaaacaggattttgcttaaaatacttgttacttgtcccaaatcaaaatattccaaaatcttagaatacttaagtcttttagtacgtgtttttttcccttgttcaaataatctgaaaatattttatatttgggtaagttgtcaagctatgtagtttgtatttctatatattttttcttattcacattggtgatggatgggggtgagcaacttaaataccaaaccagtgtttgaaaaaaaagtgtgcataaggcatgtggtataccttataaatggagttgggagggagagaatttgaaatgggatacctatttttttaattacataaatttaaactagcagacatttaaacatgaatgattaggatttttctatgtggttaacctggactttctgaacaaagaccaactgagcccctcccagtactctggtggatttttcttcagcaaccattacgcaagtcttagttgtaaccagcaatgttctgtgtgttttatgtttgctttttagttaaaaatcaccaccaccaccaaaaagaaaaacaaaattttttggctcctggattttcaaaacacatggtagacctctctgattttaggcttttattgtttaaagacagtgtctcgctttatgacccacactggagtgcagtgccacgatcatagctcactgcaggcttgacctcccaggctcaagcagtcctcccacctcggcctcctgagtagctgcatgccaccacgcccagctaattttttaactttttgtagagacagggtcttgctatgctgcccaggttggtctcaaactcctggcctcaagctgtcctcccacctcggcctcgcaaagtgctgagattacaggtgtgagccaccctggcctgattttaggctttttttgtactggggagaagagactgtgagccaaagtgtagggtgccaaaaagagctttgtgggatgagattttagggcaaagctggggcagtgtctgacttggcggtggtcatgtgtactgatttaggggaaagatcttgaggttttctcaaataattcacctatccccgtgttccctcaagaaaggtcatgttgacctggaaccataggggaaattggtggggtgtgatcagggtcagccccagctgttgctgcccctgcagtgttttgtccagagcacttgcctgcaggtcaggataggatttcaaggccagttcaggagaaagtcccaacccaccagtgcaaccaacaaaagagtaagttttacctacagcctgggttttcacaagtagcatttttattcctcctgctgtctgacatctgagctccaagctctaaacccaacctgtattatatgcagcagcaggttatctttgttttaaatcacatttgttattctgtacttagtcacctttccgtgtgatctgcatttgaaatgttgtaaacttggtcagtatttccattaaaatatcagggctaatcttgtgtattttttttttgttcctaatgattttatagacaaagactcttggcaaccccaggagaaaaaaaataaagctgtcagtggagtactagggatgagaatgaaactggaggtctgtttctggtattatggcttcccgggactctacagtcctgtatggtgaaatacatttttccattgggatcgtcaatgccatgactgttctgccacctcaaactccagagtttctggtgatgtgcaagagttagcaatatacattcagtaaagcgtgtaatcgagtaagtcgtagtaacttgggcgtaaagctctaccaccctgctcactaacaccctgatctccgtccggtatgaaaacacctattccgggtagtctggctccacgttaagcaaacaccactttccgtgttcaccgacagctagagccagaggtctcccggttgctgcttctgaggctgggtctgcagcagctgaggctcccgcctgtcttgccgaatggcctaagtctctgtcttgagactttcgagagttctaatcgtcaaatttcccattttattttgagattttccctgcggcccactatttcggacaacataggagagcctcaaaaacagtttctagcttccaactcggctcaaagttcagacagcagctgggcttccgagagccgccggtgttccaagaaaagctgcccgggactgggaggcgccctctggacgccggaacctttggtttcctgccgtggagcggaacggtagcgccaggggccttccggaaagaggagcgagagcccggcgatggcggctgcgccggccttgaagcactggcgcaccacgctggagcgggtggagaagttcgtgtcgccgctctactttaccgactgtaacctccgcggcaggtgtggcccctggtcccccgcagccggccgaccgcaaccgtgcgcctcaagctttccttccggggagaaacctaagctgcagccacccgggccgcgggacaaagtgcccgccgcgggcagggcaggggccggggaggagggggtagggaatggactgtgccgcggagcggccaggcagccctcttggcggaggatccagggaaagtgcggccccaccggccagctggcccccaggcggaaacggggcggcctccagcatgtgcccaccggcccgtcccacgcaggctttttggggccagctgccctgtggctgtgctctccagcttcctgacgccggagagacttccctaccaggaggcagtccagcgggacttccgccccgcgcaggtcggcgacagcttcggacccacgtaggtaacgcccagcgggtgggcggggccacaggcctaggggaagtcccaacccagctcccagccacaccttcgttgtctgccctctgccgtagacaactacgtgggatcgagcagcaccctctgctgggagcagcaccctctgctgggaacagctctctggtccctgggtcttcaggggatggttttcattcccacgtggccgcctctggacatcccttaggaagggcaccctagggatcacgaacctttgacgcctctgcctgtttccctcatcttgcttctcaccttgttgctcctttcttgtgactcaaagctgagtaccttgtgacactgcagatgcttggagagtttcaagcccctgccgacactttatccaaggaaggatatcaggataggacttctacctctaggcctatcacaacagctctcttgcagatggtggacctgctggttccgggtggagctgaccatcccagaggcatgggtgggccaggaagttcacctttgctgggaaagtgatggagaaggtctggtgtggcgtgatggagaacctgtccaggtgaggaaccctgtcctagggccaggtatggccacatttcagccctgaaatgactacagcccttcttctgtggactctggagaagccacagctgagttgctctgcccacagggtggtatcaggatttcaggactagggaagttgccacttgggcatctgtgcaattggtccttagtttttattgtgtataatacaaacttataggaaaacatttcaaacagttctagataaagtaatggatctctccttatcacccatcccattccccagctataaccactgttaagtgtcttattcatgctccacccttatcaggtttagtccttatactcctatctagtaggtctttatacccatttacaaattaagaaacagatgtgtagttgactcactcaggttcacacagcttctatttcaaattggactgactctcaatctggggttaagactgttcttcctggctacaagaaggcagagaccatcccttcctcccttcactggctcagcaaatatctcctggtgtccattctgggccatacccttaagcactagggtgtagcagggaatgaggcaaacctgcccctgacttcacggagtttctttcccggtatttatttaggggtgcagaggccaccagaatccacactcaggctgcctaaccccttcccagggcccttcccataagaccatgggtttgccactggtaaacaggggctatttgacggtcatggtgctggctgccatgggagttggggcatctactgccaagggtccctgatttgccaatcttggccctgcttgggagagaggacccagagctgggaaccagatggaggggcctgactccccatggcttacactttacctgaactgtccaaaagcctcaagccttgtctctctcactcccctccctactagggtttaaccaaagagggtgagaagaccagctatgtcctgactgacaggctgggggaaagagacccccgaaggtgagtccctgtgccctggttgaccagtgctgtcagggagggagtaccagtgagcaaggaggagctgaggcccagagtgatctcataagcccgcctctgctctagcacaatcatcctcacatctcattgtttgcttttaaaagcatgattttttcctaaccataaaaataatgggctgggtgcagtgacccacactaccctgggaggctgagtgggaggatcacctgagcccaggaggatgaggctgcagtgagccatgatcacaccgctgcactgcagcctgggcaacagagtgagaccttgtctcaaaaataatagcaatgtttgcctgtggtaaatacaggaaagcacaaagaagtaaataactaccgttattccactccctagaatagagatgaacattattaacatctcagcattcatgttcttttttttgagacgaagtctccctctgtcgccgatgctggagtacagtagcacgatcgcagctcactgtaccttctgcctcccaggttcaagcgattctcatgcctcagcttcccgagtagcagggattacaggtgtgtgccaccacgtccagctattttttttttatttttggtagagaaagggtttcaccgtgttggccaggctactctcaaattcttgacctcaggttatccgcccctctcagcttcccaaaatgctggaattacaggcgtgagccaccgcacctggcccagtattcatgttcttggtgtatctttccggcatagttttttttgttttttcgggggggtttttttggatttttttgagacggagtttcgcttttgttacccaggctggagtgcaatggcacgatctcggctcactgcgaccgccgcctcccaggttcaagcaattctcctgcctcagcctccctactagctgagattacaggtgcccaccaccatgcccagctaattttttgtatttttagtagagacggggtttgactctgttggccaggctggtctcaaactgctgacctcaggctatccacttgcctgagtctcccaaagtgctgggattacaggaatgagccaccgtgcccggctcatcccggtatagtttttactagttaagattgtatcctgacttcttacattccatgttataacatggacattttatgacaccattaaaaacacttcttagacattatgaatgtattttatatagattgaacactgtttcagatgctttcagacactgggagtatggtggtgaataaaatagcccttgccaacaaagggagacagattcactcatataattacaaaactgagggctctggaaggaaatcctgggtactccactgaggaatttgctctagacttagcagcgaagtggagtcaggaaggcctccctaaggaagtcgtgtttgctctctgaagcctaagtatggcatcaccacagcccagcctgttctccaatgaatggcccgcccatgttggccgtgttggttttagatcttgggtctaaaagtttgagcctgggagatccgaacatgattttaatatgcaaagagggttccaagaccaaggcagtgctttgcaaagacaactttggaaatataagactaaacagcagcgtactttacatggttccaaactttgctacttattctctctgacagcaagacatgggatccatctggtgtttgtaccacaaccctcccacatgcactcttgtcacactgtgggatcctctgggtagtggatcctggaagcagacaggttgggctcagctggatgcctcctgggtgccccttccccaagtccccggagtactgtgccagtcccttagcctgaggctgtctccccatctttgtagcctcactctctatgtggaagtagcctgcaatgggctcctgggggccgggaagggaagcatgattgcagcccctgaccctgagaagatgttccagctgagccgggctgagctagctgtgttccaccgggatgtccacatgctcctggtggatctggagctgctgctgggcatagccaaggtacttgacaccccctgtaccccctgctaccctctagagccctgctccaagaaggttgttctttgggtcagataaatgggactctgggaatccagagtaggacgagggtttccacctgcttgagggttgagagaattttcctatgtgaaggggaggagggagacggtgctgagcagggggaccagcagggaaaaagggttgggggtcaggggagctctgctgagagccctgagatcagtggagcctaggtctggaagctgtgcttgaaaaagggattaaggggcagaaccctgctgcagggcctcgggaaggacaaccagcgcagcttccaggccctgtacacagccaatcagatggtgaacgtgtgtgaccctgcccagcccgagaccttcccagtggcccaggccctggcctccaggttctttggccaacatgggggtgaaagccaacacaccattcatgccacagggcactgccacattgatacaggtaggacagcagctggttgggctggctggggaagcaggagtgcccttgaagacctggatgtgccctagaagcactgtgtgatgctcagcaagttcttgctcctcttggacctgcgttttccccgtctgtaaaacggggccggggggctggactgtgggctctgcttgctttggattcactttttttttttttgagacggagtctcactcttgtcacccagggtggagtgcaatggtgtgatctcggctcactgcaacctctgcctcccgggttcaggcgattctcttgcctcagcctccttagtagctgggattacaggcacccaccacaatgcctggttaatttttgtatttttagtagagacggggtttcaccacgttggccaggctggtctcaaactcctgacctcaggtgatccgcctgccttggcctcccaaagtgctgggattacaggcatgacccaccgtgcccagcctcatttattctttcaacaaaatctgatgcctcatggggcccatgctagatattgagggtaggattacagagacagattcagcaggcagagttggtgtcacaatggtggggagtctgaggcactggagagcacaggagaggtacttactccagctgggttgggggattccagagaggcttcctggacaagtttgcagtgtctgagttttacgggaaatccacatttttaacaagctcctgaaggtattgattctgatgcagccgaagttttgggatcacagaacaagggctttctctgctgtgccaagatgtagggtaaggtgtgagaggttctgggctggtaagggaggaactgcagcctgggagtcaggagaggctgtagcacctctggtaggacagctggctccatcctgggagccatgcctctgttcccaggtatacatcaagtttgtgcaggggcagggtagtccctgctacttctcgtaggatcctctaggggatgtctaattccccaagaggactgaggctattctggggcctggagcctccatttcctgacctgtataattggcctcatagcactgccgcctcctttccccagcccctcctcccacctcgctggagtgaagtgaagtgaccacttaggagggacaccacagggctttccagggtgaagggcctgggatgggaggggggctaggtgaccctctggagtcccagcccaggcctggtcagccttgctgctccctctgtcctccacctcactccccgtatagcctggctttggcccttcaaagagactgtgaggaaatgtgcccggagctgggtgaccgccctgcagctcatggagcggaaccctgagttcatctttgcctgctcccaggtcagagggacagctgtgagggaggagggaagcacgtggccctccctggagctccacaggccctgaaggcttcccaggcctggggtcagggctgctcctcaccctcagccacacactgagtcccatatgctcagtcctgggtggggcccttgtcactctggtcccagctcccttcaacctgcccacaggcgcagcagctggaatgggtgaagagccgctaccctggcctgtactcccgcatccaggagtttgcgtgccgtgggcagtttgtgcctgtggggggcacctgggtggagatggtaagtgcactgggcactcctcagccttgaactgtatgacaacagccttccctcaggtagccccgccctcccggctttgctggtgagtttccacgggccactcatccccgctgtgtggcagggctggctcattagtccctgggatctcaaggcctgggacttcaagggggaggagagcctccagcgctgtgacaagttgcatggcctagtcctgggcaccccctcaggcagatggacagtcaggcctgaaggacaggggcccttcctgagttctggctgtaactcccatgtttgagcagccctggcttctcctgcagggattgggttggcctgagcgcctgcctgctccccgtccagcgctgacctgggctgcctcccacttccttcactgccaggatgggaacctgcccagtggagaggccatggtgaggcagtttttgcagggccagaacttctttctgcaggagtttgggaagatgtgctctgaggtaggctgagagctgctacaccaggctgtgggcgagtggggctggcgctcgacttggagtgctgaggggctgaggctggggtgagtccgcctggagctctggttcctgcactccaggatcctctttctccacagttctggctgccggacacctttggctactcagcacagctcccccagatcatgcacggctgtggcatcaggcgctttctcacccagaaattgagctggaatttggtgaactccttcccagtaagcaggcccccggggggtcagggtcagagtgggcctcagtcccgcctggcccatttgcctctcccccttattgtggggtcctagacagaccaccaaaccctcactctgcctctgccagggtcacatagcaggcaggggcaggaccaagtctggaaggcctggctctgcctcagccctgactctggcctctctgccctgcttctgtttccctgctggtagcaccatacatttttctgggagggcctggatggctcccgtgtactggtccacttcccacctggcgactcctatgggatgcagggcagcgtggaggaggtgaggggtcacctagggtggtggggtaggggcaggctggagagggctggcttgttccaggctgatccatgctggcctgccctcacctgtctaggtgctgaagaccgtggccaacaaccgggacaaggggcgggccaaccacagtgccttcctctttggctttggggatgggggtggtggccccacccagaccatgctggaccgcctgaagcgcctgagcaatacggatgggctgcccaggtcaggccgggccttggctctcctttagccccaccctgggcccttgccatgagccctgccttccctcagacattgggcccaacccctcctctggaccttgtcctgtcccaatcctagaccacgggttcctccaaacttccaccctgggggtgggtgggggagaagctgaagctggtaagggctccagcccatcagagagagaggctctcctagggcgtccagggctggccatctgtg

SEQ ID NO: 2254 - DNA, 5100 bp, Homo sapiens
ggccgcggcggtagaggcggcggagacggtttctccatcttcccccctccccttcccccctcggagtttccctccctccctccctccctccttcccagtctgggcaccggagcctgtgaccgcttcgttagtggagaggtagctggcagtccgcttcggcgggcctgtgccccgcgccgttctcggggcctccctgctgagctcgcggctcacgctgagagggacacgcagtgacgagcggccgaagcagctttgcggttttgtagtgcatccctgagcatgagcacagaatgaaccggcgtttggatgaccaggagtcaccggtgtatgcagcccagcagcgtcggatccctggcagcacagaggcttttcctcaccagcaccgggtgcttgcccctgcccctcctgtgtatgaagcagtgtctgagaccatgcagtcagctacgggaattcagtactctgtaacacccagctaccaggtttcagccatgccacagagctccggcagtcatgggcccgctatagcagcagttcatagcagccatcatcacccaacagcggtgcagccccacggaggccaggtggtccagagtcatgctcatccagccccaccagttgcaccagtgcagggacagcagcaatttcagaggctgaaggtggtggaggatgcgctatcttatcttgaccaggtgaagctgcagtttggtagtcagcctcaggtctacaatgatttccttgacatcatgaaggaatttaaatctcagagcatcgacaccccaggagtgattagtcgtgtgtcccagctattcaaaggccaccccgatctgataatgggattcaacaccttcttgccccctggctacaaaattgaggtgcaaaccaatgacatggtgaatgtgacaactcctggccaggttcatcagattcccacccatggcatccagccacagcctcaaccaccaccccaacatccttcccagccttcagcccagtcagccccagctcctgcccagccagctcctcagcccccacctgccaaagtcagcaagccctcccaactgcaagcacatactccggccagtcagcagactcccccacttccaccgtatgcatccccacgttctccgccggtccagcctcacacaccagtgacaatctcgttgggaacggccccatccttgcagaacaatcaacctgtggagtttaatcatgccatcaactatgttaataagatcaagaacagatttcagggccaaccagacatctacaaagcattcctggagattttgcacacatatcaggtaaggagtgcccattcagcctcattgacagagcaggaggtgtatgcccaggttgctcgtctctttaaaaaccaggaagatttgttgtcagagtttggacaattcctaccagatgccaacagctccgtgcttttaagcaaaacaactgctgagaaggttgattctgtgagaaatgatcatggaggcactgtcaagaagccccaactgaacaacaagccgcagaggcccagccagaatggctgccagatccgcagacatcctacaggaaccacccctccagttaagaagaaacccaaactgctcaatctgaaggattcttctatggcagatgccagcaaacatggtggtggaacagaatcgttattttttgataaggtccgaaaggctcttcggagtgcagaagcctacgaaaatttcctacgctgtcttgttatttttaaccaggaggtgatctctcgtgctgagcttgtgcaactagtctctcctttcctggggaaattccctgagttgtttaattggtttaaaaactttctgggctataaggagtctgtacatctggaaacttatccaaaggagcgagccacagagggcattgctatggagatagattatgcttcttgtaaacgattgggctccagctatcgagccttaccaaagagttaccagcagcccaagtgtacaggacggactcctctctgtaaagaggttttaaatgatacctgggtttccttcccttcgtggtctgaggactctacctttgtgagttccaagaagactcaatatgaagaacatatttatcgttgtgaagatgaacgctttgagcttgatgtagttttagagaccaatctggcaacaatccgggttctggaagcaatacagaagaagctttcccgcttgtctgctgaagaacaagccaaatttcgcttggacaacacccttgggggcacatcagaagtcatccatagaaaagcactccagaggatatatgctgataaagcagctgacatcattgatggtctgagaaagaatccctccattgctgttccaattgtccttaaaaggttgaagatgaaagaggaagaatggcgagaagctcagagaggctttaacaaagtatggcgagaacaaaatgagaaatactacttgaagtctctggaccaccaggggatcaactttaaacagaatgacaccaaggtcctgaggtctaagagcttactcaatgagattgagagtatctatgatgagaggcaagagcaggctacggaggagaatgctggtgtacctgttggcccacacctctcacttgcgtatgaagacaaacaaatactggaagatgctgctgctctgattatccaccatgtgaagaggcagacaggcattcagaaggaggacaaatataagataaaacaaatcatgcatcattttattccagatttgctctttgcccaaagaggtgatctctcagatgtggaggaagaggaagaagaagagatggatgtagatgaagccacaggggcagttaagaagcacaatggtgttgggggcagtccccctaagtccaagttactgtttagtaacacagcagctcaaaaattaagaggaatggatgaagtatacaacctcttctatgtcaacaacaactggtatatttttatgcgactgcaccagattctctgcctgaggctgctacggatttgttcccaagccgaacggcaaattgaagaagaaaaccgagagagagaatgggaacgggaagtgctgggcataaagcgagacaagagtgacagccctgccattcagctacgtctcaaagaacctatggatgttgatgtagaagattattacccagctttcctggacatggtgcggagcctgctggatggcaacatagactcatcacagtatgaagattcactgagagagatgttcaccattcatgcctacattgcctttaccatggacaaactgatccagagcattgtcagacaggtgaggttgcagcttatgtttattcagagccaaggccaggtccagctgactattgagcttctggacacagaagaggagaattcggatgaccctgtggaagcagagcgctggtcagactacgtggagcgatacatgaattcagatactacctcgcctgagcttcgtgaacatctagcacagaaaccagtatttctccccaggaatctacggcggatccggaagtgtcaacgtggtcgagagcagcaggaaaaggaagggaaggaaggaaacagcaagaagaccatggagaatgtggatagtctggataagctggagtgtagattcaagctgaattcctacaagatggtgtatgtgatcaaatcagaggactatatgtatcggaggaccgccctgctccgggctcatcagtcccatgagcgtgtaagcaagcgtctacatcagagattccaggcctgggtagataaatggaccaaggagcatgtgccccgtgaaatggcagcagagaccagcaagtggctcatgggtgaggggctggagggcctggtgccctgtaccaccacctgtgatacagagaccctgcattttgtgagcattaacaagtatcgtgtcaaatacggcacagtattcaaagccccttaactgcaaagccagagcagataacttggggtgtgtgtggggatgtgtgtgtgggcctatgcactcacacactgaagaaacaaggaagatgcctttcaagcctcactgggcctctctgggacatggccacctgacctgtgtgtggctggtgcagcctggcaccaagtgggctacctgttaggaacatgaataccttacaaagctgaagctggaacttttcccaaagggttttgggtatagcctgccctggaggggaaggaagtccatgcaagcaaagacatgcagtttgcttgcacacaccagcagagctaagactggagtctcctgtggcctaactttcaatgagggaaccggatgctgttcacactttgactggatggagatgcatttacaaaacagactggagaaggacttaatactcagatggattggaactatcatggtcactgctcctctcccctccccacaaaaggaaaaaaaagctggatttgattttttttttctggtcactcgagcacatctaagatcacccattaggttttatctgggacctgcagtttggctttgggattgatcatcttgtggattttattcctgacgattcccttgctgcctacccttttctctcctctggttctcaacctcaacgagttcaaatcagttgtcctttttagctcccgtggaactgttttgtatctgcctctttactagtctaccttagtgccatccaccagctttactctctgacacacacacgcacacacacacacaattttaacttgtttttttgtacataatgtacatactgtcaattttttattaaaagaaatatgctttgatgtgctagcataactgctctagcttcttgtgtaccatagtactgtggcttcagatttagtacctatgaacagatgtacaagacatttattacactttttaccaaagggagttaccattgtagtacttttgtgtaaaacttgtcttcccctttgcccccaactttttttttttttttttgtaaataaataaagcttggttcttacttaaggaataaactctcaacccacgtcccttgtcctcaccagaaaatactgtgaagcagggattttgacttcagttccttatccagggtagaaacaggattttgcttaaaatacttgttacttgtcccaaa

SEQ ID NO: 2255 - protein, 1208 aa, Homo sapiens
MNRRLDDQESPVYAAQQRRIPGSTEAFPHQHRVLAPAPPVYEAVSETMQSATGIQYSVTPSYQVSAMPQSSGSHGPAIAAVHSSHHHPTAVQPHGGQVVQSHAHPAPPVAPVQGQQQFQRLKVVEDALSYLDQVKLQFGSQPQVYNDFLDIMKEFKSQSIDTPGVISRVSQLFKGHPDLIMGFNTFLPPGYKIEVQTNDMVNVTTPGQVHQIPTHGIQPQPQPPPQHPSQPSAQSAPAPAQPAPQPPPAKVSKPSQLQAHTPASQQTPPLPPYDRSPPVQPHTPVTISLGTAPSLQNNQPVEFNHAINYVNKIKNRFQGQPDIYKAFLEILHTYQVRSAHSASLTEQEVYAQVARLFKNQEDLLSEFGQFLPDANSSVLLSKTTAEKVDSVRNDHGGTVKKPQLNNKPQRPSQNGCQIRRHPTGTTPPVKKKPKLLNLKDSSMADASKHGGGTESLFFDKVRKALRSAEAYENFLRCLVIFNQEVISRAELVQLVSPFLGKFPELFNWFKNFLGYKESVHLETYPKERATEGIAMEIDYASCKRLGSSYRALPKSYQQPKCTGRTPLCKEVLNDTWVSFPSWSEDSTFVSSKKTQYEEHIYRCEDERFELDVVLETNLATIRVLEAIQKKLSRLSAEEQAKFRLDNTLGGTSEVIHRKALQRIYADKAADIIDGLRKNPSIAVPIVLKRLKMKEEEWREAQRGFNKVWREQNEKYYLKSLDHQGINFKQNDTKVLRSKSLLNEIESIYDERQEQATEENAGVPVGPHLSLAYEDKQIDAAALIIHHVKRQTGIQKEDKYKIKQIMHHFIPDLLFAQRGDLSDVEEEEEEEMDVDEATGAVKKHNGVGGSPPKSKLLFSNTAAQKLRGMDEVYNLFYVNNNWYIFMRLHQILCLRLLRICSQAERQIEEENREREWEREVLGIKRDKSDSPAIQLRLKEPMDVDVEDYYPAFLDMVRSLLDGNIDSSQYEDSLREMFTIHAYIAFTMDKLIQSIVRQVRLQLMFIQSQGQVQLTIELLDTEEENSDDPVEAERWSDYVERYMNSDTTSPELREHLAQKPVFLPRNLRRIRKCQRGREQQEKEGKEGNSKKTMENVDSLDKLECRFKLNSYKMVYVIKSEDYMYRRTALLRAHQSHERVSKRLHQRFQAWVDKWTKEHVPREMAAETSKWLMGEGLEGLVPCTTTCDTETLHFVSINKYRVKYGTVFKAP

SEQ ID NO: 2256 - DNA, 1670 bp, Homo sapiens
ggccgcggcggtagaggcggcggagacggtttctccatcttcccccctccccttcccccctcggagtttccctccctccctccctccctccttcccagtctgggcaccggagcctgtgaccgcttcgttagtggagaggtagctggcagtccgcttcggcgggcctgtgccccgcgccgttctcggggcctccctgctgagctcgcggctcacgctgagagggacacgcagtgacgagcggccgaagcagctttgcggttttgtagtgcatccctgagcatgagcacagaatgaaccggcgtttggatgaccaggagtcaccggtgtatgcagcccagcagcgtcggatccctggcagcacagaggcttttcctcaccagcaccgggtgcttgcccctgcccctcctgtgtatgaagcagtgtctgagaccatgcagtcagctacgggaattcagtactctgtaacacccagctaccaggtttcagccatgccacagagctccggcagtcatgggcccgctatagcagcagttcatagcagccatcatcacccaacagcggtgcagccccacggaggccaggtggtccagagtcatgctcatccagccccaccagttgcaccagtgcagggacagcagcaatttcagaggctgaaggtggtattcagctctttttcttgggtcaaaaaatttatctttagcaggaaatactggttgcagcttgttggttgtggtggtacaacttctaacctgagatactagctgtcgaatcacaagttttaccgtttttgttttgtgaaatttgcttatgtttcctatcttggcatcagtgcctgatccagagaagaatatactcaaatgtttgtggactgtatgaatgcatgtcggtcaaatgttatcaggattgtggggccattttaatacaaaataaaccttaaaattcattttttggctgcttccttttgaactctctattgagcacatatatgattggctacaggttagtacagtaaattggcccagtaatatatcttacagttcaatctttttaaattcttaaaaatttttttttttagtttttagtttcagagatgggagtctcactgtgttccccaggctggtctcaaactgctggcctcaagtgattctcccatcttggccttcgaaagtgttgggattacaggtgcgagccactatgcccagctcatgcctgtaatgttcttattacctttatctttttattcctgtttatgaatagctgaattgactcacatcatcaagtccattcttagtaaaacacatgctcctttttggggggaatctttataaagttcagggaaaactgtaactgtgaatgaattatcagtgttttcatattttctgctgagtatgtgtggtacgttttcagtgctttgaaattcatgaggcatccctggagaagtgaagcttgtgttcccagctaaccttgtatctctgaccacttgaatgttacttttcaaaatatgtgattgttgcagcaagtgttcaggtttcaatttttctaattttacgtttatataaaattaagttcaggaaataataaatggaggaactctgaagagatgttaaatcttcatttggttattgcaacctacttatgttgcttgcaggcacgaatgagaaataaaccct

SEQ ID NO: 2257 - protein, 156 aa, Homo sapiens [sequence omitted]

SEQ ID NO: 2258 - DNA, 5090 bp, Homo sapiens
ggccgcggcggtagaggcggcggagacggtttctccatcttcccccctccccttcccccctcggagtttccctccctccctccctccctccttcccagtctgggcaccggagcctgtgaccgcttcgttagtggagaggtagctggcagtccgcttcggcgggcctgtgccccgcgccgttctcggggcctccctgctgagctcgcggctcacgctgagagggacacgcagtgacgagcggccgaagcagctttgcggttttgtagtgcatccctgagcatgagcacagaatgaaccggcgtttggatgaccaggagtcaccggtgtatgcagcccagcagcgtcggatccctggcagcacagaggcttttcctcaccagcaccgggtgcttgcccctgcccctcctgtgtatgaagcagtgtctgagaccatgcagtcagctacgggaattcagtactctgtaacacccagctaccaggtttcagccatgccacagagctccggcagtcatgggcccgctatagcagcagttcatagcagccatcatcacccaacagcggtgcagccccacggaggccaggtggtccagagtcatgctcatccagccccaccagttgcaccagtgcagggacagcagcaatttcagaggctgaaggtggtggaggatgcgctatcttatcttgaccaggtgaagctgcagtttggtagtcagcctcaggtctacaatgatttccttgacatcatgaaggaatttaaatctcagagcatcgacaccccaggagtgattagtcgtgtgtcccagctattcaaaggccaccccgatctgataatgggattcaacaccttcttgccccctggctacaaaattgaggtgcaaaccaatgacatggtgaatgtgacaactcctggccaggttcatcagattcccacccatggcatccagccacagcctcaaccaccaccccaacatccttcccagccttcagcccagtcagccccagctcctgcccagccagctcctcagcccccacctgccaaagtcagcaagccctcccaactgcaagcacatactccggccagtcagcagactcccccacttccaccgtatgcatccccacgttctccgccggtccagcctcacacaccagtgacaatctcgttgggaacggccccatccttgcagaacaatcaacctgtggagtttaatcatgccatcaactatgttaataagatcaagaacagatttcagggccaaccagacatctacaaagcattcctggagattttgcacacatatcaggtaaggagtgcccattcagcctcattgacagagcaggaggtgtatgcccaggttgctcgtctctttaaaaaccaggaagatttgttgtcagagtttggacaattcctaccagatgccaacagctccgtgcttttaagcaaaacaactgctgagaaggttgattctgtgagaaatgatcatggaggcactgtcaagaagccccaactgaacaacaagccgcagaggcccagccagaatggctgccagatccgcagacatcctacaggaaccacccctccagttaagaagaaacccaaactgctcaatctgaaggattcttctatggcagatgccagcaaacatggtggtggaacagaatcgttattttttgataaggtccgaaaggctcttcggagtgcagaagcctacgaaaatttcctacgctgtcttgttatttttaaccaggaggtgatctctcgtgctgagcttgtgcaactagtctctcctttcctggggaaattccctgagttgtttaattggtttaaaaactttctgggctataaggagtctgtacatctggaaacttatccaaaggagcgagccacagagggcattgctatggagatagattatgcttcttgtaaacgattgggctccagctatcgagccttaccaaagagttaccagcagcccaagtgtacaggacggactcctctctgtaaagaggttttaaatgatacctgggtttccttcccttcgtggtctgaggactctacctttgtgagttccaagaagactcaatatgaagaacatatttatcgttgtgaagatgaacgctttgagcttgatgtagttttagagaccaatctggcaacaatccgggttctggaagcaatacagaagaagctttcccgcttgtctgctgaagaacaagccaaatttcgcttggacaacacccttgggggcacatcagaagtcatccatagaaaagcactccagaggatatatgctgataaagcagctgacatcattgatggtctgagaaagaatccctccattgctgttccaattgtccttaaaaggttgaagatgaaagaggaagaatggcgagaagctcagagaggctttaacaaagtatggcgagaacaaaatgagaaatactacttgaagtctctggaccaccaggggatcaactttaaacagaatgacaccaaggtcctgaggtctaagagcttactcaatgagattgagagtatctatgatgagaggcaagagcaggctacggaggagaatgctggtgtacctgttggcccacacctctcacttgcgtatgaagacaaacaaatactggaagatgctgctgctctgattatccaccatgtgaagaggcagacaggcattcagaaggaggacaaatataagataaaacaaatcatgcatcattttattccagatttgctctttgcccaaagaggtgatctctcagatgtggaggaagaggaagaagaagagatggatgtagatgaagccacaggggcagttaagaagcacaatggtgttgggggcagtccccctaagtccaagttactgtttagtaacacagcagctcaaaaattaagaggaatggatgaagtatacaacctcttctatgtcaacaacaactggtatatttttatgcgactgcaccagattctctgcctgaggctgctacggatttgttcccaagccgaacggcaaattgaagaagaaaaccgagagagagaatgggaacgggaagtgctgggcataaagcgagacaagagtgacagccctgccattcagctacgtctcaaagaacctatggatgttgatgtagaagattattacccagctttcctggacatggtgcggagcctgctggatggcaacatagactcatcacagtatgaagattcactgagagagatgttcaccattcatgcctacattgcctttaccatggacaaactgatccagagcattgtcagacagagcttatgtttattcagagccaaggccaggtccagctgactattgagcttctggacacagaagaggagaattcggatgaccctgtggaagcagagcgctggtcagactacgtggagcgatacatgaattcagatactacctcgcctgagcttcgtgaacatctagcacagaaaccagtatttctccccaggaatctacggcggatccggaagtgtcaacgtggtcgagagcagcaggaaaaggaagggaaggaaggaaacagcaagaagaccatggagaatgtggatagtctggataagctggagtgtagattcaagctgaattcctacaagatggtgtatgtgatcaaatcagaggactatatgtatcggaggaccgccctgctccgggctcatcagtcccatgagcgtgtaagcaagcgtctacatcagagattccaggcctgggtagataaatggaccaaggagcatgtgccccgtgaaatggcagcagagaccagcaagtggctcatgggtgaggggctggagggcctggtgccctgtaccaccacctgtgatacagagaccctgcattttgtgagcattaacaagtatcgtgtcaaatacggcacagtattcaaagccccttaactgcaaagccagagcagataacttggggtgtgtgtggggatgtgtgtgtgggcctatgcactcacacactgaagaaacaaggaagatgcctttcaagcctcactgggcctctctgggacatggccacctgacctgtgtgtggctggtgcagcctggcaccaagtgggctacctgttaggaacatgaataccttacaaagctgaagctggaacttttcccaaagggttttgggtatagcctgccctggaggggaaggaagtccatgcaagcaaagacatgcagtttgcttgcacacaccagcagagctaagactggagtctcctgtggcctaactttcaatgagggaaccggatgctgttcacactttgactggatggagatgcatttacaaaacagactggagaaggacttaatactcagatggattggaactatcatggtcactgctcctctcccctccccacaaaaggaaaaaaaagctggatttgattttttttttctggtcactcgagcacatctaagatcacccattaggttttatctgggacctgcagtttggctttgggattgatcatcttgtggattttattcctgacgattcccttgctgcctacccttttctctcctctggttctcaacctcaacgagttcaaatcagttgtcctttttagctcccgtggaactgttttgtatctgcctctttactagtctaccttagtgccatccaccagctttactctctgacacacacacgcacacacacacacaattttaacttgtttttttgtacataatgtacatactgtcaattttttattaaaagaaatatgctttgatgtgctagcataactgctctagcttcttgtgtaccatagtactgtggcttcagatttagtacctatgaacagatgtacaagacatttattacactttttaccaaagggagttaccattgtagtacttttgtgtaaaacttgtcttcccctttgcccccaactttttttttttttttttgtaaataaataaagcttggttcttacttaaggaataaactctcaacccacgtcccttgtcctcaccagaaaatactgtgaagcagggattttgacttcagttccttatccagggtagaaacaggattttgcttaaaatacttgttacttgtcccaaa

SEQ ID NO: 2259 - protein, 1008 aa, Homo sapiens
MNRRLDDQESPVYAAQQRRIPGSTEAFPHQHRVLAPAPPVYEAVSETMQSATGIQYSVTPSYQVSAMPQSSGSHGPAIAAVHSSHHHPTAVQPHGGQVVQSHAHPAPPVAPVQGQQQFQRLKVVEDALSYLDQVKLQFGSQPQVYNDFLDIMKEFKSQSIDTPGVISRVSQLFKGHPDLIMGFNTFLPPGYKIEVQTNDMVNVTTPGQVHQIPTHGIQPQPQPPPQHPSQPSAQSAPAPAQPAPQPPPAKVSKPSQLQAHTPASQQTPPLPPYDRSPPVQPHTPVTISLGTAPSLQNNQPVEFNHAINYVNKIKNRFQGQPDIYKAFLEILHTYQVRSAHSASLTEQEVYAQVARLFKNQEDLLSEFGQFLPDANSSVLLSKTTAEKVDSVRNDHGGTVKKPQLNNKPQRPSQNGCQIRRHPTGTTPPVKKKPKLLNLKDSSMADASKHGGGTESLFFDKVRKALRSAEAYENFLRCLVIFNQEVISRAELVQLVSPFLGKFPELFNWFKNFLGYKESVHLETYPKERATEGIAMEIDYASCKRLGSSYRALPKSYQQPKCTGRTPLCKEVLNDTWVSFPSWSEDSTFVSSKKTQYEEHIYRCEDERFELDVVLETNLATIRVLEAIQKKLSRLSAEEQAKFRLDNTLGGTSEVIHRKALQRIYADKAADIIDGLRKNPSIAVPIVLKRLKMKEEEWREAQRGFNKVWREQNEKYYLKSLDHQGINFKQNDTKVLRSKSLLNEIESIYDERQEQATEENAGVPVGPHLSLAYEDKQIDAAALIIHHVKRQTGIQKEDKYKIKQIMHHFIPDLLFAQRGDLSDVEEEEEEEMDVDEATGAVKKHNGVGGSPPKSKLLFSNTAAQKLRGMDEVYNLFYVNNNWYIFMRLHQILCLRLLRICSQAERQIEEENREREWEREVLGIKRDKSDSPAIQLRLKEPMDVDVEDYYPAFLDMVRSLLDGNIDSSQYEDSLREMFTIHAYIAFTMDKLIQSIVRQSLCLFRAKARSS

SEQ ID NO: 2260 - DNA, 128928 bp, Mus musculus
  misc_feature (1)...(128928): n = A, C, G or T/U
gggttagcctttagataccagccaacatgggatttttgggacagggtctctacccagcttaccatggagactgggctctctgtctggagagcaccaagaatccacttgtctctgcctcctcatagctagaatctgaggcaggcactactattccagctttttaaaaatatgggttctggggatgaaatgcaggcaaggctgtgtcctgtgcaaggctatggacagacttgtcctgtgaggtggacaactgtcattatgtacttttgacaaaggaggaagttgggggccagagggtctaagcaattcagttaaggtcacacagctaggattcagggaggcaggattttgattcaagttgactggctctagtctttcctagttatcaccgaaacctcttctgtcagagagggtccctgttaaattcaggctgctcaagccttctgagcactaaaggggaggctcctgcagggaccctaaactctagctagttgccctgcgaactccatacccagatactcctccagtcttgccctctcccctgacagtggctattcctgtcctataggcctcctctgtgacactgggcataaatctcatctgggatgggacagggcctgggtgaacttgacatgagacatgcatgcataaaaataataagaagtagaaggatgaaaggagggaaggaaggaaggaaggaaggaaggaaggaaggaaggaaggggggaggaagggaaggaaggaagagaggaagggagggagggagnnnnnnnnnnnnnnnnnnnnnnnnnnnnnnnnnnnnnnnnnnnnnnnnnnnnnnnnnnnnnnnnnnnnnnnnnnnnnnnnnnnnnnnnnnnnnnnnnnnnnnnnnnnnnnnnnnnnnnnnnnnnnnnnnnnnnnnnnnnnnnnnnnnnnnnnnnnnnnnnnnnnnnnnnnnnnnnnnnnnnnnnnnnnnnnnnnnnnnnnnnnnnnnnnnnnnnnnnnnnnnnnnnnnnnnnnnnnnnnnnnnnnnnnnnnnnnnnnnnnnnnnnnnnnnnnnnnnnnnnnnnnnnnnnnnnnnnnnnnnnnnnnnnnnnnnnnnnnnnnnnnnnnnnnnnnnnnnnnnnnnnnnnnnnnnnnnnnnnnnnnnnnnnnnnnnnnnnnnaatgctgggattaaaagtgtgaacgagcacacctgacccttggcctccctgagtggttaagatgcagatgctaagtcatctttcttctgatttacaaaacccagaacatctgacgacctttacttatcattggaacccttgttctttagtcgtgagcatcaagcaggacatttctattacttgaaggcaagtgacactcgagccccagtgctcaaggctgcttacagtattccagccagggagggaaggaggcacatggttgggactatgaattagacagacataagagagatgaactgggacaaaaccgtatttaattatgttggtgtgctggggagccccaggggagatgtaaagatgggtcagataattgtcacgtagcatcctgaaatacagaatggaattgtggggacttggggcttcggagagtgtcagagaccagtcatgggaagtgggcggggtaacgatgtggttcttgtgcagagaacatctcctaggtgatagaagctgtcgggagcagccatcgctctgatagaatttaccaacgtggatgtcagtttctcccacagaagtgcggcttttcagcactccgaagcctttggttcctcagaatagctgcctcaaaatacatcaaggaagtgtatttcagggtggcatattctagtctcctaaagtcatatttttgggtggtatgctgagtcccaaaaagtaaaaagcagaggcaaaagagagtgatacggcttcagtgcaatcaggtcttcaagagcggtgcagcgaagaacagcaccctcccctcgtccttctggcaggcatagaaatcaatcaggaataaagaacacagagagatggtgcctgacttgaataggagcagatggttcttggaccttgcaaagaatctgtatttcgaaaacatcttgttacttacgtactatgtgtgtgcggaggtgtgcgcatgccactgtacacacaccgaggtcagaggactctcaagagtctggtctctcctgccatgtgggttctggggatgagactcggggcatcgggagaggatggtgccgctggggtaaagggggagattctttctaatgagagtaccctccaccgagacaggggacaatgctcactgtgaggcaggctcagagggacaggagttagcagacctgaagacactgttctagaagaggaggtgtcgggccctgcacatggagcctgagggcttcctcccagtctctgagactgcatcctcgattgctgaataggagaggcctctcccatgaggccatggggcactctctcttcccaccactgagggtaccacaaggacaagagggaagaactgtcaaagctcctctccctctcagcctcctgactctctgaccttacctctgctctctatctctttgtgggccccttgtcttcaatgcaaggctatgaaaagcctctggctcaggtattgaagctgagactagagtccacctgtgtgactcaggaggtgtgcgatggtgacgtggcttctgcatgcctatctgacagggccctcgaagcgcatgaaaaggcaaacaatgctctgtagacataggtgatatgggaaggtcctggaacccactccactccccaggagttcctgatccacagtcctgagagtagggatgggaactctgcatttctaacaagttctggggtgctgctcaaactcagagcattccaggtggtgccagtgtttaggtcccaaagatgccacgggctaggaatctgtttatacccgggcttagaggtaccctcggttggtgactagcaggacagcaggcctttctctgatgagcaccgctaacaaccagtgaatggtaggaggggtcactttaatgagaggctttctgctgagccctccaggacaacactctggggagagtggcagttgcagagggacgtgagtgggcaggatcaagagactagattgactgtatcccaccctgaatacatttctccggcatacgttataatgatgttgaagacaccagaatggctcagaaaagctgcccctttgtaaaaagaaatctaggggttgtggggataaatcaggtagtgaagtgcttgatgcctaagcatgaagaccccaagttcagatcctggacacttgcataaaaggctgggtgccccagagctgggaaagtaggcaggtgaggagtccaggagctgctgtccagccagtctagataaactcctgagctccgggtttaaaagacagatgctaccacacagaagcacctccctctgctaccaaggagggtatctgagccttcaggttcacaagacacctcacacgtgataatgaatctgccattgtctcctgctgattttccctttagttcataggctttgttgttgaagcaggaacgctcccctcaccctcccatagttacgatgtgtgcgggtctttgaatcccagtctgcatggaagctggggctggttgggctgtgggtttgtaagccccatccatgcccatagacctgtaactggagcccttggtctgctttgctttttaatgcaccctgcatgggtgagtcctgggtctgcagggaacagagcaccagggaagtggatgtcaccaagatgagattctgtccttgcaaaagcaggtcacctgctaaagctaggcatccagggcatagtaaaagtggagccaggcctaggccctaagcctgctgctggggttgtgtgcttacggaggccagacagccacaacgcctccactttattttttgagacgtggaggggacagcagttgtctattcttccctcgttccaaggttgtctaacaggagcttcctggtgctttatcgcagaagggaggggcagtcagagccctctgctttctctcagtgctgtctagtcgagaatctttttacgtctatttatttattccatcgaggggtgtgcttgtgccgcagtgtacaagtcaagagaggtcggaggtcaacctactggagtcacttccccccttctagcatgtgggtcccggcaccctgtcactcttaccagcaggcacctttacctgctgagccatctcactaactccaggtagcagatccctaagaccgctgccatgtccactgtgctggacaggagtgtgaagtgtgggaggctaaacaaataagttcccatgtcacacggtggagatgtggttgaagcagaatttgaacccaagccttaggagccaggtttctaaccaccatactctgtaaataagaagcagacttttggataccataggcccctgactgcctatacagtgctgaggaggagccctccaaggctgctgttttcccacactgtccttgcctgtttactattggtgccccaggaacagctcctcccaacccccaactacccagccccacacacatgtgtgtatacatacatgcagaagtccctgccccacacactctcaacctcacagataaggtcaggggaccaagagcctgcagctcagaggagttagccccagtctagaccccaggtctgcctgctgccaggctgtctgtcattattcaccctgcaggtactgagtgaaaggaatgtcccacctgccagacccctcccacccaggtcgggacaatgatgaatgtctatagacagcagtggagaaatgctgagaggaaggagggaaggcctggactgagacaaagatgaggagcttggggcctggggagatggctcattgggtaagcgcctgtacttccattccaggcacccaccgtggggggctcacaatctcctgcgacttcagctccaaaaggacctgttagctctggcctctgtgggcacctgcactcatgtgcagatgaggatcatggagccacagtcgccgggtgacagaggctgacgcaggagtgagggacatgccctgagatggcaggcctggcacaggtgggatgagaaggggagcaagagcggtggtcaaggtggagagaggggagcccatggcagcaggtgtgcccgccgagggtgggaacagagcaaaggcacagggtgctgggagattcaagccagcgagaatgtggctgcactacagggtcagctgggagcagtggagggagaggctgcaagacaaagagatggagaaggcaaaccacaaccctgggaagcagaaaccggcgtgggggtggggtgggggacagctgattgagcagagcagctgccatgtccaggccttgccaggcagaaaagccagcacgcatttattcttccaggaagtgaaagaaacacacacacacacacacacacacacacacacacgccccagagacagaagaaaagtgaaatccttattgagcacacagaacgggctccgagaagcatcaaggctagcgatgaaaacctcctcaggatgcacctgggagggcttcctggaggagccagagatggaggagaggacgatggagcagcagctgcaagtcacagaatggcaagggttaggtgacacagtagacctagaggaacaaggggcaaaggcaggccccccaagactctgttccggcctcagtctgagggacagcagagagccactgggagattttataaaacacagacccatgtgtatgagcagaagcgcaggaacttgtagcttagaggacagatggtgagcgccgatgagtgccggaggcaggcggccaaggcctagtgaagcaaaagaaaatgctgagctcaagggaagatggagaggagggggaatgccggctgctgccgctgagcagaccagcaagctggaaggctgagtagcccagggcgtctagaaggtagcatgatggagttgggggctagaggacgggggaacacctccctctctctggcttcttcactaggtctctctctctctctctctctctctctctctctctctctctctcatgctctccccctcccctccctcttttttctggctctttgctgtaggacggcctctgtctttagaacccagaggatacccacttctgtgggactttacttcctaggaaattgaagcctcctgcaggccaggaacaagccttcctcccactgtacggaggcaccgaatacaggactggccaaagctgggcaagcaagtatctttggccagtgaagccgcttgtctagaggacctgatgctttgcttgtagaggaggacctgagtaagatggctaccgggattggtgctaaagatggctatggaagccatctcagggcagccggaagctacccagaatcccctaggtgtgtctgccttggagagtgaaagggggcggggtaatcagagctcattaaaaaaaaaggcaaataaacagaagtcaaaaccgtgtgactcagggagcatcaggacatctgcatagagatgccattcgagctttggaggatgagtatgagttttgtgagttttgtcgtgctgagaacaagggagaagggcatcggaagttgaggagagaaagtgggaaagcattagggcatggtcgcctctgtcatgatcaggcacactgaggctgttcataggcactcttctttataacatgatttgtaacctacagcccaagctagcctatgtttaattttacatgtaactcaatgcatgatccaaagagctcagactagagctacgtaaatagtaaataccgctacaagtaagaggtaggaactcccgcacctctgtctagggcataccctgaaacggagggtcctggactcccagcccaaaagcacagtgccgaggaagagtgtggttgagcacgctgccctccatgactgacaacagccaggtgactctgtatgcaccctcctccagtgggccccagcagtgccctcgaaaacacctttttgccaacctcaggggccactgcatctcctcctgtggtctctctccagtttaagcccctgactccatctgtgtgtgttctcaagcctgcctccaagtggagcaaagcaagataggcacagtggctggagcacaggccgggtggtactgaccatgggaatgcttacagctctgagtccctccttcaggccgatcctacacgtggcaccagaggactgggcatcttgccggggcatcgtgcttatccaggtgtcctttctatctacggagatgaagatgtgacagaaggagggagccagcagccatgtgagggacctagagtgtctcctgtctgccttcagagcccatcacatgggtcctggggatggcagattgatgttcctaattacatttggctcaagataacattaagtgtttgtcttgttcccagagcccacaacaacagcagacagcgcggaaggtgccaagaggcatgctgggtaaccgaggatggcaatctgggatgtgagaggggtgatgggtgttggttgctggtgttcttggctggcccttcagtactttctaatagggccatagggctggatggagaagcctggcaatgatggttccattctcctgtcttaaggctctcctgttcaagactaccatcctgacatggaatccaaatccttctgataatgaccaactggctgatgggaaatgttatgggtctcctttacatttcttctgctgatagaacacttattttgcttgaattggtgtgtatgtgtgtgttgctggtaatggaactgagagccttaatatgcatactaggcaagcatgccatcctagagatacaccctatctttgagtatgtatgcatatgtgcgcatgtttatgatggccagaagtcaacgatgggtgtttctccttcctcctctgcctttatttttgttgtaattgagacagggtctctctctctctgaacccagggctcattggttagctagacaggctgggctgcaagttccagggaccatcttaccttcacctgattcacactgagaatacaggtatgcactgcaatacttagctggggatttgaactcagggcctcaggcttccctggcaagcactttcactgactaatccaatctcccccgctccatacatcatccttgatttgttcctggtgacattaaacttttcctggagccttatgcatactgggcaagcaccctatcattgagatgcagtgtgtgtgtgtgtgtctctgtgtgtgtgtgtgtgtgtgctatgtacatgcttgtgatggccagaagtccacaatgggtatctttctcaaacattctttgcctttagtttcgttattgttgagacagggtcatgcaggaagataaatcatacccaggggccagctagctccctgctgtactgtcccatgtggagacaacccagagactctgaactaagtgtacagtggttggatgtcaggtaaggatggggttcagagaatgaagccggcatttctggggcgggtggggggggtgaggcagtaaagacttgaggcctggcatgactacacctaggaggggtctggcgcagagccaatgcctgaggcctgaagctacatctgctctccctagagacctagtaaagttgctgcaaggcccctggagacggacaggtgtttatacccttcccaagatgcagaagaagttcaaagatggcagcagctgtggaggaactctgtaactcacagacacaagtcctggctctgtcactgtgtcagaccaggtacgtccccccacgaaatctgctcattcttagggatgcccccccaaaaaacccaaaacaccaacaaaaactaagataaaacaaaacaaaaaaaaaactgtaaataaaaatatcgggatctatgccaaagcactttatagtagttgtcactgtgtgtagtactgttctagaaatacagctgcggaatggggcaggcatcctacctccctgttcctgcaccttcctccggggcaggtgctcacactggactgcagtgaagaaactctgagagcaggtggcacacttcagaaaccccgggggggggggggagagagagagagagagagagagagagagagagagagagagagagagagagagagagagagagagagagagatatgctccaaatacctcattccctcctcccttctcggtggttgcagcggctccttatctgtccaaaccggttttgcccaggtactcgcatggccatattcaggcaattgtacttgaaattcctgcagctgctacagggtgtaggtaacctggctgggatttgcctagagcaactaactgcacctgtcatctccccagtgatgtgaacactcttgaggagggtcggtcctgcctctcttacagagagctccccctgtgtccctataactatagaacgcaggatctgcaaaggaaacctctaagaagcttgccaccaagcagagagcctctgggcgagtctggcgagccaactgggcccaatgcccctctgtctaagtactttacactcaagtcctgccacttcctatgtaacatggaccacattggccttaggcgagctcatcactgagatgcgaaggagtgcttccacgagccctcctggccaccctgaactcgtgtggcagctgcgggacccgtagcgggtggactttgggaacctccagggggcgaccagccctgggaaggcatctccggccgcgcgccgcgcccgtccagcttgtgacttcaccgggcgcccggagccaacgcggcaccgaaggccgggtccccgcccacggccccggccgcaggtgccaggagcccgagggggcagcgcctggacgcgcggggctggggaccgtcaggcgcccggactgcactcccgcctctgcctccgcctcctctttgtagcgagtccccggtcggtcctccccgccccccgcgcggcccgccgcccgcctttcttcctgcctcgccttcctgcggcgcggcggcctcatctattatagatgctcggccgcggctgacatcagccagcggcctcccgagcgcgcggtccccagcccggcccagccgcctgccgccgcccgcgcccagccccaccgcccgctttctgtatgactgtcacaaaggtaagcagcgcagatcgtcgccacgctggggacccgcgggtgctacaaccccccgggcagggacttgaggggcttaggaagggatcgcgcgcgcgcgcgcgctccagctcccaggagtcgctcggcccccaggggactacgggatgccgggaggggatgctcctttgcagctatcctggacggtgtggaccacatcactgtgcgccccgggactgcatttttaactcttgtggaaggtgctgcaattttaacccctggaaagctgcttcgggctggctggcgctctgggtgtctgtccctcagtgtcacgcgccgtaaggactgagggatccatgctgatgatgcagggatgggctggccatgctagtcagacacacaagggagctgaaccccacctgcctgtctttgccatttaccccagaagcctgggcctgactccaaagctaccctgtagaggcgctgccggatccctgagtggctgccagagacagggaaggttctactgcatggggtgggatgggcagggagtgtgacagagaggagcaggtaggcatcctggcagaccccagtttggaagaggttcttggacttgtcacaggagcccgggtttgttgaagaacttttttggggacgtcttccctgccaatggaagaatggagttaagaggagagaccgttggggcagtgggataagccctgggccaaggcagatttgagtctctctacggagaagggctaggcctagtttgggcttaggtttccttttctgcaatgggataagatgagccttggtagtggtgggacaaacaagtgaagagtatgaactgtactcttcccaggttctgttggagtgctgacctcacaccctggcatcggccttagccgtggatttggccgtctatacaccttaggccagactccatctttcccagatgctcagctggctctcacagctgaggaggtagaagccaagcaggccaggcagcctgctgtggtcaaagccttacagaaaggctgggcggtccattctagatccttctaataagctccttaccccagcgacttgctcagcccggctcggacttcacttcagaccttgtcattgctctcagttctgggacttgggagctgtatgagaatgataacctgagggctgggggcggatgtgcctggccttaactttgtcaagctagctatatcaagcggcagggtgcttagtgctcttaaatgagcataaatgcagctgggcagagatgtgttgttatggagattgtaaatgccaaagcttcaggcaggtgggggctgaggagcaattcatgggccgggtgggagcataagtgttaaggctgaagatgaccttgcaaggactgaccctgcaacctctcctgtctatgcacacggattcagacaacttttctcccttgaaggtaaaactgtttaactgaggaaaaagctgagattcggagaggtgaggtgacttgcctaaggtcacatagctaatataagtatggcaggattcgggtttaccctcaagtctgtctcagtctcctgctgagccatcagtctgtatgactgggtgtggggcttccacagcagagggacactgtctgggggcctaggatggtgagatggtggaagtggggcccacgtagcccactgtcagaccttcccttaggtacgcgaggattattttctaacactctgacacctccctgcccagcccccaacgaacccttccgtgtgtctcttgtctcctgccgaaaccaaggtggctttggcttaagccagatcagaggattaaataaaatccccactttaaccctgttttctctctacgccaggcctgtatggcacaaccccagtcctgtacagcacagggagtccctactgaacaaggctcttccattgccccaagagttagaagacatggcctctaggtgtcctaggctggccactaactggctgtgtgaccttagaccagtcatttctctcctcaggctttgggcaagtgttggttccaatgagccatgtcttctgctctaacaaggtatacttggggactgtgatccggggggtggtcctgttacagactaaagaggagaacccacaaagaatgtgggagatggagtcactgtaggggacggagtgactagtgataaacctctggtcatcttgctccagaggaagagtcatggtgtccctctgtgtcccctgacagaagcctctgggccagtgtttggtggaggtcacaggctctgagctctcagagggactgacacaaaatgaagaagacaaagcagacaggaagttgctagaggatcagctagagctgagccccagtttcccactgaccaccctgcctttcaatgtttcccaacccattcctcggggagccacaaatgccttggaagctgtgaagggacatctgccctaagtgtcaacagccacacagccatgctgtcactggtgacatattaggacacctttctcaccatatgcatgcatctctattgaacgtgttttgccaagcaatcctaattcctttatggaaggggttgggggacagtggaaggaaagaccagatgcagcttcccagcctggaaatgcctggtcaaggccacgcctcagcctcttcttctacaaaactagtcctctaggacagcccagagctacgtcctggtgacaggcactccagaccgctttcatgctcagttctcatgcctgcccttcctggtgttctatctggatccagtccctgaccctccagtgctggtgttgcttccctacgtcccaacacctgaaccgctgtcaggtagatcagagcgtaaaaggaatcagaaccgtgtgcgctcaaagtacaagttcatgagctggaagaaaagtccagacggtatggaggtggtatgcagatctcttgcctacctcttaattgacatatgactaggggttggtagggcttgtaggcctaggagcgatggggcttgtaggtctagaaagaggtcccttacaccagctgggcttgtctattctcctttatgctgtgttgagttagagcagtggttctcagcctatgggtggtgacccctctggagactcataacagatatttacattatgattcctaacagtagcaaaattacagttatgaagtagtaccggaaataattgtatggctgagtgagggtcgaccacaacacaaggaaacatactaaaggatcatagcattaggaaggttgggaaccactgggtgaagtagtgagctttgcaggctctggggctaacttggagatcacagtgtaccctgagtggcaggaaccagttgaacatgaggagcacctagaggtgagtgtgtgggcagaggtgaccctctatggcagccacctcctatctgaacagtgactccaggaaagggggtgacattgtcgccatgtctctggccttctttgtaggccagctgtctgcctcctgccttaatcacagcctcagcccgcttacaggagcaactggctcccgctgaaagggaaggagctgtggaccgcatggcactggccaggaaacagtgtttggcaaagatcagatgcctcctgggcatcggggagccaccagcggagagcagaatgttagcgacgacgtcaaacatcctacgcttttccttggaaaatgagggacccgagatcctgggagcacaggtcatgacctgctccagccattggccagtctggagctggagggtgaaagccagtctttgagactctgaatggcctccctcctggtggagttactcctcaaagggacctcaggcggcctgagtggtattgtgcagcttccctgtctgctgctgggatctggattcccctctgctggatcatctcctcatggtgtgtgtgtgtgtgtgtgtgtgtgtgtgtgtgtgtgtccatgccctctaggaccttagaggagcagggatggaagagatgagacagtcacaagttaaaggttacacagatggccgtcagcagtcagtcctgcctgtaaacactcaatagatgcaggctccttcctgcctgcatgctgtaagcactcaatagattcaggctccttccttctttctgtcttccttcccatctctgccatagagtagtaagctcattttctagagaagacattagtcctttattactgttggacccagaggccctgtgccctctcatgggagaccttaccccttggcaccagtggtcactcttagaatcatctgggaaggattgtaaagtagtgcagaacttgccagttagaagcccagctgctggcaggacccctggcctggcagctttgggcctggaggctcagggttggagtgagtttttccacggctcttgggcagacactgccgcagccaacaccgctggagccaccactgccagcagagtctcgcctcctggcacaagggcagccagtgactgatttgcatctgcctggctctcagagctgttaggcggtccaggagatgaggcaatgtgtggactccctgtgtgcctggccctgctccttcccccttctgtagagtagctacgctgccctgagcttactaggtggcctctggggacccaggccccagctccagagtagcctgcagccagggcagctgggagcagctggcacaaggcaggcatgccctgccagggcagggcagatgcaaagctagtggctgccacatgagaaggcgctgtttagaatgagcctccctttgtgagtctggagtggcaccagctgcttgggggcatgaaagagtgggggagggggagctgccactggttcttcctacttcccctcacccctgcaggggcccctggagggactttgtaatcagtttctggcctggtccttccttctaattaattaaggaagcactgggggctgcgggggtttgctggggactcaatttacagagtgcgtgcttgagccgcggccctgaatccttaggccatctgcaccctggagtgtcctcctggtttaaggatgagtaaacagagccttgtgggtggagaggtcaccacaccctagtcacagagctgatgtgggtcagaggcgaatgcaagccccgattctgacttggaaactcagcctttccaatctcctcttcctagttgccatctcttcctagttgccatctttttattctttttggttttttgagacagggtttctctgtaaagccctggctgtcctggaactcactttgtagaccaggctggcctctaattcagaaatccacctgcctctgcctcccgagtgctgggatcaaaggcgtgcttcacctcgccgtcaccacagcgggggggggggggggnnnnnnnnnnnnnnnnnnnnnnnnnnnnnnnnnnnnnnnnnnnnnnnnnnnnnnnnnnnnnnnnnnnnnnnnnnnnnnnnnnnnnnnnnnnnnnnnnnnnnnnnnnnnnnnnnnnnnnnnnnnnnnnnnnnnnnnnnnnnnnnnnnnnnnnnnnnnnnnnnnnnnnnnnnnnnnnnnnnnnnnnnnnnnnnnnnnnnnnnnnnnnnnnnnnnnnnnnnnnnnnnnnnnnnnnnnnnnnnnnnnnnnnnnnngagtgtgtaccttgcagaactgggagatgaatgtgtcgtctgttttaaggaccaaagacatcttgtccagcacatggtgtctgacaggaggctactcggacaatgtgccaggctggttataacagcaagtgacacctgcagactcacctccatccccctgacattgagaaatggaagagtctggtccaaacctattcgaaggcaggcttctcttctagttcctggtgaaggaaggcgcccatggcagaaggcaggtcttgaggtcagatagatagcttgctctcatttacttgctctgtgttcttaggcaagctgcctaatctctctgtatgtgcttccccgtctagtagttgggattgataacaggaacatttatagggattattgctagctctggaggagcctgttggtatgaagtactttccacacttacctggcagtgagttttaatacagcaagaaggaaggaaaccagctagtatcctgtcaaatcagcagcttcggaggcctggaccagcctccattctgccttgatccttctagtaggggctgacccctgacgggtcaggaagtgacttgaggtgtattaaggatggagaggaggtaacaggtgaaacaggggtcacctaggagtgatggagaagcacagtgagagatcaggatgtgcaaatgtctggaattgaactccaaagcccatggggattttgcctgcacaccacaaggaggaatgtggaatgtgggtgtcttctcatttaatgccccggatgccatgatacaggatgctctgaagactccaagagccctgcggaaggtagcgcagtcgggcagagtggaggttgacccgatgtgggcctcctaaccgtggctaccttccctcccctggcccgagagtcggcaaagggaaaatgatcccaacctggctaagggaagtggacatggcatgctcagtcaccctggcttgtccccagagctttcctggacttctaggagggcagtggtcactctggccccaggctgcagagtgaggtcatttgtttccagatgagctctgggaagagagatagatgcctgccttccatctccagtgagctcaggcgtggcaatttgaggtcctggggctttttttactatctaggttgggccttggactttaaagtgctcccatggggaactgtatacaggtgtttgaaggccgctgccccacagctaggcatcagcacagctggagcatcaagaagggaggagctaaacaaccagagcacgcatgccccaggcttacatgcagggggcagggggcaggggctgtgaggacaagggcccacaccccaggtgctctggccgaacagagacaaagggaaaaacacatccccactgaggagggttcctgggaacctgtgctcagggctaactccagggaagcctggttcatagggtcaagctccctgaaactgtgggcccctcagcaacatttgatgtttaggaatggtgcgagtcctgcatgtccctttcatttgctcttaagggctgctgagttaggaagaggctctcagcctctcactcttgggtgtagagtcccattttcaagggcaacagcaagagcggtagctaatgcttccaaatgcttagaatgtatcgtgtgtgtgtgtgtgtgtgtgtgtgtgtgtgtgtgtgtgtgagagagagagagagagagagagagagacagacagacagacagacagacagagacagacagagaagacagacagagaaacaaagtgatagaaagaaaaagacggagagagtgcacatgtaggactggcctggaacccactgattcagagacttgtctggccagcaaggcccagtgcccctcccagtctgccttcccttccgaggcctgagattgcagtatgccaccatgccgaggtccaacccaagtctttatgcttccaaggtaagcatcttacagactgaattatcactcccacccacactataagtattttaagaggggctgagagtgtggctcactgatagagcacttacttgcccagcaatgacagggcctaggttctatccctagcactgcaaaaaagtagtttatattattacattattagtgtatcaatccttatggaaacctctgaggcccgtgactatgggaaatcccacagtctcagaaactgaggcgagtgaaggaagagagctagctaagggtgcacagcaagtcctcccctctcggctcagcctgactccagggccttcggtctaactactgtcaggcaaggcaacagagcccagagcatagccagaggagagagctggagacagaaagttcaggccttgtctttgctctgttctttgcctgtacactgttgggctgggtcctgagcatctctgagcacctgttctcttacaacatcccctttcactgtaaacatggaagtcatacggacattgggtgcttcgtagatgccataggaggtgatctgtgttgtcttctttgtgtctgcttccccacccgtgccagtatctcgctgtctgcagagctgtgcagtctcattcaataactagctcatgttcccctactgcagtcccgaccagaattgattcataatctgtgggcggaaaggaagctcttccaaacagcctctgttcctgctccgtacagatgagaagttgctgttctttctccccctttggtcgatttgtgccgcttcagtatgattggggtgcacggtatgcctgggaaacaactgtggtctttgggtctgtggagagatggctccatcagtgaggtatttgtgtaagcatgaacacctgagctgggacgtcaaaaacccaagttaaaagtcaggtgtggctaacatgtgctataatcctagagctggacagacagaggcaggaagatctgaagcttgctggccagccagactagcctaattggtgagcttcaggcttggtgagagaccatctcagaaaagaaggtggagatcaactgaggaagacacctaacgtgcacgcctgcacacacacacacacacacacacacacacacacacacacgcatactgctttgattttaaaatttagctagataaagcctgaaaccctgatatggcacctcacagaaggggcgggggggtgcaacacagacccagagcctgatcctacccatcagtcctgcccatcagtataggtcaccactggtaacctgaacaggaatgaaccttgctaggctacaccatgaacactagggcgccagcctgctttgccttggggttcctgagaaggaatacccttgctagcttaacaagcttaaccctaacaagccaattaaatgcctggaatttctttctgaactctcggctttgggatccagaagctggcaggattagtaaagatggcagagatggaaacactccagaggactctgatcacgctgctccgccgaccacatgaaaggtctctttgcagaaatccccagtgaaagtcgggcttgtggggaaggggggttctgcagacctgagaggtcatctgataacttcatcgtcctctacctgtcttctaaagatcccgtgtctaccttccgatcacagtctgtatgatttctgagaacagacccaagttactatagattgaggttactttgagatctgagctagctctttcttccaggatcctagggcacagtgatttctctgtccttggagcttggggatgcccagcatccgagccagcaggtagagcccaacatgtgtgatgtatgtgctactgatcttttttaaaacatggtttcagggtcagccccaaactgatatgtagctgatgatgactgtagactcttggttcttctgcctctaactcctgaatgtcaggattacaggcatccactcccattcctggcttacacagtgctgggaattgaaccccaagtctttgtggttgctaggcaagtactctacccactggactacatccccggccgcatactgatgatttccgggtctgttctctggctcaagaacttaactgtgagcctgcagagaggctccaggcttattcctcccacgacatctgttgaagggccaagcactttagcaagggtgtatgaggatctctggaacaaggcgtgagcaaacccaagataccggccagacgctgctgccgggtctcagttctcaggaccgacaggagccagaggagcactgaagatgtgtagggatgtgccccacccccacagcccctgtttgccaaggaaccaatagagacccagaagatctggctgagagggtctgggaaggacattgctctttgggggaattcctgtccccccagttagtgaggtgcagtcaagcgggggcttccctgtttcttgtactggcctgatactagcagttcgagggctgagttaaaggatgaggatggaaagttctggaatcttgggaagacttagagagctcagccccaattggaaggggcccctgagtggagaggggtggtttcccaggggaccagccaagagtaccgtgtgtgcttcgaggcctgggtccaaccgtggcagagataggaggagcaatctctgatctcttctccaccagcagcctgggattatggaggcctgccaggctgccactgtggcctctgcagtccctgttggaaacctcttcctggcatgctgggctctggccagccctccctcctttattcattgaagccctgggttgggagcctgggttgctaagagctttcctctggccagcccctatcaccagcctgaggaaattctcagccaagttatggctgaaactctggcctgagggagagaaagggaagatggggggaggggaaggaatgggtacttgggagcagtaaacaaagctgtggggccagggaggaccatcttgctggagcagcatggagctgggactgtgtgggccttggctttcagtaaaggagcgggaaggaaggttctcagatgcctgcccctccactgtgcatggcatggccagacccctacttcatgcaccccaaaactctgctgtgactcacatttttcagttggggaaactgagtctccaggcaccaaactatgaacgcgctggccaggctgtggatgatagacagtaaatgggaccctggcctttcttttcttgatgtgtcttttcaagcctccagcttaggctcgctttagagtccagcccctttgagacctttagttgttgttttaaagcagggctaagaagcccagattagccttgaatttactccatatccctggggtaaccttgagctcctaatcctcctgcccttgcctccccagccctggcactgtacctgtgcgctggcgtgcagtaatttcttgttcttgtcgaagcgcaacgctgggatcaaacccagaaccctgttcatcctaggcaagctctctaccaactgagcgacatccccgggcccctctgggcctttagctggtgtaagtcccttggaggggtaacctttcagcagttgtggcctggtcttcagaatgaagttcttgaagggagcagggtgagctctggggtccacgattgagcaggtctgaagagaagaggcacagctagcttctctggcttgctctgcactgatcgccttcctgccccagccccggtgcaaacacagagaggcacgactatgaaggtttgtgagctaagctgccagctgccctggggatgcacacagggttaaaccacagcattgtgtctctgtagggagagcaggcctctcagaaggacaagtggattcaggggagctggggaaggggatgccaggcaaggcacagaggtcagtgatagagatacctgctcagagctgtggtgctctgaggagtgggctaggacagtgtctggggggtggggtggggtggggtgggactggctctgtctttaggatgctcaggtgaggatagataaggggcaaaaaagccattccagaaggaggagtgtgagccacagtggggagggtcacacatttagttcagtgtgggccacacaagagctgggagctcctggagatgagcagggaggttgagccacagcggagaggctgggaggagccacgggactctggatgctgagccttacagagagtttaagtgaagtgccatggtcctgtgtgcacttttggagagcctgcctccacctgtgttgccctggagacagagaagaagcagacacacccagcactttccctgtttcctaagggtagcacccagcaggccacttcaagacactgccctgccctttatcctagacttcagatacaggggaagctgggtaaggcccatctccttccaggaagacatggacagagcacagtaacaaggccgtgtgggacccagaggcccctgcctgaatcctgccctcaattcctgtgtgaccttaggttgccccccaccccctccaggactcagctgtctcaggataatatctcctggtgcgactgggttcaggagtgactgagccctgaggctgtcctgatgtggcctttgtttatcttcctccctgccctgagttcccagacccagaagcctgcctctctttgtgagtgtgtccttcactgagcacacccttatccttctcatccttgttctgggaggacctcaagagacttcccatagaagggcagtgttcaagtccagtcacccatgtgccccatggtctgggcttgttgctgcatcttagggtagcctggtgcccatgctatacggtgaggggtcctcccagccagggccttgcctggctgtgccctctgtctccttcattcatcagcagagctcttctctgatgaaattctatctcgttctcagtggtacccgagagtgtgaggtcatacataagaaccttctagagtggtagtgattgcaggagtgaacgtgtgtataagcatccactgctccatttctgcacacccagggtttgtgcagtaggtcatactacatatattttacacatatgtgaaagcataaacagatgcaaaatgttccctgactcccataaaaccacctactctaggatgctgctttgtgttacagatagcccagatatggggataggggaccaggcctggggtctgcactagaactttggaagtgcaaactcagctggggctcacctggccaggactaacctcctgtttctggggctggcttgtggacctgaaccctggatgtggcatgattcactattcttccgtgacccgtgaccgtctagaagttgttccgagttttgtaatcagttctgtagttgatcggctcttggcatttctaaagagcactgagatgctcagggagctgttttaggtggcagtgtgtttcctagagatcccttcaggaacagccaggtctggttctggcccttagatagctggtaacacaggcattgcagttggttcgcccagggacagtgagatgaaggaacacaccctaggagtggttcctgagcgattgggactgagagccacaggaaggaggggagaagggcgaggcactggaggacagtaaccaagggaggttagttggtggtgacagtgacaattctgagcactgggagaaaaaggaggatctaggcttctaggatgctggagcagagtcctgtgtttgggatgctgggtggggctggatggcaacataggaaataaccatttgaaaaccagaatcccattggcaacaggagccaccgaatattccagatccaagaacaatgtgccctacaaacattggaataaataaacgaaagaggctggtgggggcccgctcctggggactttggctctccagacagagcctactctgaggatggtgcttttcagtgggggtgcccgacctcccagaagtacagtcttgggcagtaatgacagagccgacactgagcagccgactagtcctcctggatgggtggtggttaggagtgcctctgacagggacagaactctggactccatctcactgcaggttacgccccgcccccatgagcagcctcagcaggaagggcagtttcctgccatcccctgtcccccacagccctgggagctctgcagagctgggggtgggaagttcttcatggaagtgacgccctgtttctgagttagccgcagcagatcaaaagcatatctgtttgtttgtgttgcctgaaatgtttacaggaagatgagaaagtagctctgtttattgaacatatcctccagggcagaagccacagggaaaagtcagcttctggtgtctcggtgagcattcgccggccgggcgggcttcgtctgggttttaagccgggcggagcctcagcatctggaggaaggagagagaatgccgaagagaccagggggtcctctcatccttcctgactccatccaggctctggagagcctttcctgaacttcaaatagtaactggaatttcagcctgcctcccatgatgagatctgcctctgccatgctgtgtgaccctgggcaacttgtctaacctcactgggcctttaattccaattttgaaaggaaggagttatcaatccaggactgtctgctccttgagagcattcagagggtctggtgtggtcaggcatgtggaagaatggttgcacggtactaaggcaccatatgcaaggtttaaagccgggaaaatggctgactgggaagtccacggcccaggtgagcctatgggttcagagcacaaggtgtgcccgcttgatacaggccctaccctgcctcagtggctgggacaaagggccccttcctcctttagctaggccttaatgtcccttgtccctgagaatgctggcaggatttcctcccaggaaggagattcggtgtccggtttacttcccctgggagttgcaggcaccaaggagtaaggtagcaattcgtcctgacagtgggacaggcgaatcttcagatgtgaaagcctggggctccatgccaagctggatagtggtcagggcagctgccactcacgagagggggcggagctgcctctgccagccctagggaactgcatgagttgtctctgggaccctcctggactgacatcctattctcagacccatgactagcctgctgtccctggtcccaggatagattttatccctaatcacagttaatttccttcgagcaatcaaggctatacacaaacctacaaccagtaagcacctgctgtatgccacccattactctggctcagaggataaggatagaacagatttgtctagcttttaaggaagcagaactctcttttgggaagtgggcaggcaaacagaagaaggtatatgaatgagggctgaatgggactcaggaagcctgctcaggttctgggaagggggacacatgcttgagtatgaatgcatgtgactgaggagctgtgggggctgggaagatggaggctggtggcgaccaggtctggggagtggcctgttcagctgtgcatcagtgcacagcaaggaagagagaggatacagcccagctccgcggagtcctcagcgtctctcactaagggtgtgttgggccagcaaatgttctagaaaagtgggacacatctacactctgatcaaaacagaagagctccctgcccttaggaccgtcccgggagggtggggagcctgcgcagagcacaaataaacatcccatcagttggaagtaaatgacattaagaaatacccagccaggcaagggctggcgtgacagagcagcctcggtaagagaagtggaaggaagagaagggtggagcatggaggattctgaagacgctggctcagagtggccggctggaaggctggggagacctggcctgccacagacattaaagcctaggtaaaggaggaaggggccctttgtcccagccacaggtcagaagggaggcagaggaaaaagcactctctgcctctagctactgactgactgggagctgcagggaggaagataaggctgaggcctgagcccagcagccacgttgagctatgagggtttggaaagagatgcccttaagagatgcatgaacgttgctgacagagcgggactaagaacgctgctgccgaatggcatgcagggcatcccgaacatttgggggctgggtattctgcagagggatccctgcatcagttgcccaggtttgctgacctgtggcccatagagcagtcagtagcttcgcccgccaccacctctcctctcttgaggattcttcaaaccaggtcatgtgttcctgttgcactgcctgcactaaggaaggctccggacatcctcagggttgcacttccctgtctcccagcattgatcggctcttctctctctctctctctctctctctctctctctctctctctctctctctctctctctctctctctctctcccctgtgggtaattggagctatggttgagtaaagcaaagagctcttaagtctcagacttttcagtcaagcaggagagacaggaaaaagaggcttgatgctttgctggctttggggcacagcttttccagggctggcctggtttaggtggtagagatgctgtgaagtttaaatctaacaggaaagctggggacagagtgcgaagcactggggttccctcacttcccaccttgccctagcctacatggagtcttccacctgggtctcccagcatcctgcccgcagcctgtaacactgtacctattttgtggaggggcacagtgaggcttatagggattaggtaacatggccaaggtcacatggcagactgaggtggctctggattctgtcacatgtcttgtaatgtttgcctctctcaaaagtcctgcttttagtcaataaagccttctgatggcccctctcctcccatcacaaaaggaaagaaaaggggaacgctctaacaaacaagccctcctgttgccatggagcgcggggttgtcacccgagtgactgcggtaaaccagggcagaaagaagagggttcgggcaaaagtccagctgcggttctgtgcccatccctgttccccattcccagtcagcacagtgtgatagacggctttcgatgcctggaggtgtggggggcagctggccagtctcagagccctggtggtgggccttacaccgggtgcaagtgggccagggggcaggcatgagggctggggcgctgcaggcttggcataccagcctacacctctgatactagaaagttccaccttccagaagccaccaggaggtaagtgtcctagagaggtgagcacctggtgactcgggcacttcctgtcctacagcccctctatacagctccttccctcctctgccaagggcccaatcctccattgggccagcgctggcatttctgcccttccccttcgctcctccctgctgggctcagtctgtgtggagacaagtgaggcccaggaggagcttatgcaggactcctgttctgatgagggttgctgggatctgtggtttcttttgaggactgaaatcagggtagccatgttgtaggttcgccagggagggcctagctggaacaggaagtagatgagggacctgcccgccagcatctttctgaccaaaccactcacctggatattggatgctcccgtctctggccgctgtacacttctttaacttctgtttagatcacccactgttctgcttgctcccctcaaactcaggctaaccatccctgcccactttcgcaccggagaaacttcctgatcttatcccttacagcccagtcagcgtgcgctctggccgcaggtccctgccaggatgacatggatgcatcagaatgcatctcagccttactgccacagagtgagccctgaggcctgcggcagcaggttaggagtgcagcagggcgtgctccctctatgcctggtgctgtgtgcgttcaattaaagcagtggctcttgaccttcctcattcggagaccctttattacagttcctcatgtgttggtgacccccaaccatagcattactcttgttgcttcttcataactaattttgctattgttatgaatcatgatgtattttctgatggtcttaggcgacccctgtgaaagggatattcaacctccaaaggggtcgccacccacgggttgagaaccactgaatttgagactattgcatgatgtgcctgtattttgctcaagaaagtcagctcatctcctctgtgtgcagcgtagcttcagtcacatgaggctcactggttggcacattttctagagagtacagatgacagcctctcccctgtttcagggacagaagaatctagaataaattgggggttcattcttcacccccttcttacccagactgaaacagggctgccctggaacaattttagagaattgctccccaggacaagtcggttctccatcctagagtggcaggccctggtgaccctgtgactacagtgtcccctcctaggctcaaccctcccctaggagactgtcatatgcctttctggacatccgggtctcctaatgccttgattcaaaaacccatcttgtctaattgtgctccaggcctgagtgaattcagagactattagccaagctctggggggccccgggtctccatggcaaccaaggatgcttcctaatgaactaagtccttggagactggctgggggtgggggggtcccttgcctgtctacgtgtctaaactgtttttgctgtctctgcttctgagatagcccccccccaccttgagaagggacacagggctggatagaggacacagaggaaaagtgcaagtggcccatgatatgaccttgtggcccacggtatgaccttgtactgcgtggaaggaagaatgttctagctgacctcacagctactgccgaggatttcttcaacccacagacaaatgaacaccttttcatataaaatgcacattcatattcagacacatggcacacaagcatgcatgtatacatgcataaatttgcacatgtatgtcatgcacttgtgcaacatgtatatgagtgcatgcatgcacgcacatgcatgtgtccacgcatacatgcacacacacacacacacacaccacttcatattctaagagcctacgtactaattttttttttgcagcttttttcctaacatgagtgttgtaccttggctctttggcacctcctccaggaagctctcttgggttgactgcaactcctgcttctagaatgatacttggctaattcatgctccagagagccctcttgcagcccagtctcaggctggcacctcacaaaggacacgctacttctttgctgtgggatgacagacaattccttcagtgtgggtgggtctcatcccccactaacctcttccccgcaccccagggcttgttcaactggagaaagggtttgctagtaatccctttctcctaagcctggggcatgtctatttatgtgggtactgggaactctaccagaccctgccgccttttatggtggttatgacagtctccaggggaaggtgtcctaaaaccagggctctagagaaggagggaagatgaaggaagccccagtgacgtcagcctggtggcagcagggtgtgggtgagtatgggaggagatggagcaggtgtgtgtgtgtgtgtgtgtgtgtgtgtgtgtgcagatctagccatttctcctctgccatcacccctccccctccccgccctgctgactgttggtttctagaaagagaggagaggagtgacccaagaggatgctggctggttgatttttaattaaaggggactggacacctcccaactaccctttggagcagtggcattcctagggtgtcgtgcttccatcaagaggaacaaggtggcatgcaagtgtgggggcagctagccagcagagcagccagaaagccaatgcaggcaacagaggctctgtggctctgcatcctccccggccccactcccatctccctggggctccagcactcctaagtgtccaccctgcccctgcaccaagcctgcatcagctctggctgcatccaaagtgactttgctgccctggccctgggggctgttggcaagtggggtggcatgtggtgggaactcacagattggggacctgcttgtcctggaccccatccatcctgcatcccctgagtgttgcctgttgtaaggcgctggggataaaacattcatgtgtcggccagcaaagttacagtcaagggcagcgtgggagggaggctgctggggcaacgacattgggacagtgagggtgctgggatgaacaggaggtggtcagggtggggaagagaggaaatttgcttcaggtagtggcactgatggcagtcttaccaaaggcaagggtgagtgaccagtagacagaggctgtgaaaacagcctcacgtgcaaaggccctgtgaagaggagcaaggctccgaagcacgcagaaaagctgactgcagccagtgcctccttgtatttggtcaggggtcaggcctgctaggcccttgtattcccatttgtagggaccatgcacttgatgctaagcatagggaccagggaactgcttagtgatgctacccaaggagtcacactacatttgggggcttgcttttgtttcatgtttctaagacagagtctcagctgacctggaacttgcaatcctcctgtctcagcctatagatgtgtgtgccatgcccaactccaggtttatgtttcagaagatcctccctaagttgtaaatgttttcaggatgaaaacacagaatcaactggacatggtgccacaggcctgaaatcccagcacttgggcgcctgaggcaggaaggtctccaattctaggccagcccgagctgtgtaactctgaaaaaagccaagctttcttgtctgctcagtgctgtggaaggaatggagggaattacaattaggtgttcccaggtgttgacagcttggctcgcatggcaggtacagggtctattgggcagggtgcatgaagtctgtatcgtaggtcccttgctggagaacccccaagaggcactgcctgcctgtttcctggtggccacatttcacagaaacatgcctgtttcttctcaggctctgggtctgtctgtgctgattgtcaacagcacacactaagcccgtctctccttggcatctgtgtccttttcttggctgggtggtttgcaatcctttgtctagaaacagcagccacctggaatcaacaattctgccccaactctgaacaaaagtgtgtctgagagctcttggtgcttaaggagtcccctgagaggtctgtggtggtcatgctgcgttaggatgctcgtcactatgcacccacagggtgagctcatgtgcggctgggagagaagctgttcacgcaacagttgctaggctgaatgaatgaatgaatgaatgaagtgcatgcgtaaaggcatgagcagatgaacgtggcttgtaaactccaaatcaccatgatctagtgagaaagaaagaggcatgcttgtgggtggcactgggatgggggggagctttaaaaaaaatgtggtgtagctgggcaatggtggtgcatgtctttaatcccagcatttgggaagcagaggcaggtggatttcggagttcgaggccagcctggtctacagagtgagttccagaacagccagggctacacagagaaaccctgtctcgaaaaaaaatgtgatgtgtttgtccgtgtgtgaatggtgtgcatgggggtgacacatacatgtacctgtgtgtgcgtacatgtggaagccagaggacagtctcaggtgccatcctcaagagcacagcctcctttgagacagaacctctcactggcctggggctcaccagttaggctaggatggccatccagcaagctccagcagtgtgtgttctctctgcctctcttctgctggccttacacacttgtgtactcatgcctgcgtactgtgagttctggagatggggatgggtccttctgcttgtgaggcaatcactctgctgactaagccactctcacagcacgtatctcggtacaaggtcacacgccgatgtcagggagtgtaggtttgtaggggacagagttagggtactgctgactgagctggtcagagtgagctgttcggtgtgctcccagcttcatattctaacccccgttgcattgggagatggtcactggatgaggaaattgggctgagtgaagtgatgaagtagaaccctaccccaagggaactgctgtccacccatccgagttctaaccaggcctgtccttgcttagcatccaagatcagatgaggttgagagcactcagggagttaaggccttaggcaggactgatgtcataagtggggtgcagagggtacgggagttagggggaggaaaggtcacttgaagatgtaccaaaaaggttgtggtctgcaagccagaaagagagacttcaccaggaaccagccttcccggaccttggtcttgtacttctgagaaatgacatggccattgcttaagctattgaacccgtgatgttctgtatgcagcggtcgcacactgaggtgtggatgttagcctggaatgggaggtcagggccgacagactaaggagggggcagacatatcgtcccagaagtcagggtcactggtctcatcctagattcagaatgagagccaggctgtagggtgagaggtacaacatgttccaatcctctccctctctatccttctgctctgaggtcctggacaagctttgaaccctcagtttcctcatctgtaagtgtggggaacaatagtagtctctccataggcagaagtgttgcgatcggtcagtgtgatttacgtgtacaaagcacctgacacagggcttggtgaacacttcggtggtctgagctatcccctctcccctttactgtgtctgctcaaggtcattactccagaactcccagttacagggcctcagcattgctcagaatgtcttgtgatctctgttcagtgctagcctctaaggtcaggaacgaggcttggctctctgtggcctgtccagcatcaaaccatctcctcactaggaatggatcaagcttctgtctgaggactgcaccatgcccaaggagaggcagacacctgactggtgaaggcagagatgctcaggagacatccttgagggagccttgctggtcctctgtgggatttcacactaaggaggagattgagatcccacatggctagactgtccaagtcttcctgggaactctggcaggatcaggttctccctaggcataaactgtgatttaatacaacctcctcacttcctgacaaattcagcccaaagtttcagcctagtattccaacaccggaaacccccaccttcagactccaaggagagaaaggagggctcacggtgcttttgttctgtctggctaccgccgcgctgactgcattctataccatgcatttataatcttgatagtcaggaaactattaagccactttaaagacatttctcagtagagagacaaagtccaaactcccagctgcccagcatcatcctggatcctggggtaacgtggtccaaaactgtataaaccattatcaaagacacacaaagtaaagaggtgtctgccttctggagagcaatttggcaacatgtctcacggccgtaaaaatgtccacatcctgtgacccagtaatcccactcctgggaatgtgtccagaggaagtaatacaacgcagagaaaggctctgagcatcaagatgctcgccagaacactgtttatacagctccagagtggaagcaaaagaggggcctgacaaccggagactggttaagtgcattaagtagcatatttccaatcgaacattctgcagctgttaaaatttatatgtgctggggaggttggttaggtggtgatgtgtatgtcatgcaagtatcagggctgagttccgctcttcagataccagcacacacacacacacacgtacacacacacacacacacacacacacacacacacacacacaagccaggcatgatggtgcctaactatttggcaagttcttggccctatctcaaaaaacaaggtggcccatgtctgaggaatgacagctctggcctccacatccatgtatgcacacacagctgtgcatgtacatgcacacacataatgataccactgaaatacatgccaagcagaaataatggtagggactggtgggatcaagtcagtgggtgaaggcacctgccatgtgatcaccggagcgtgacttccgccacccatgtgaggctgagagaacaattctgctgttctctgacctccatgtgtgtgctgtggcacgtgtgcccacacatacgccacacatacacacataaataaataattttgtacaaccaaattttaagtggaaatagagggatatgaggttttataggtagcaatggtgactgtgcagatctaatctcaaggtgggctgtagggatgtggcagggactcttccgtgtaccaggggtctcagggacgggccaagtagattaaaggatccctcattccggttcaggatgttaggtcaaaaatatctgcaagacactcgagggggtggggtggcacatgcctgtaattctagccctcccaaggcagaggcagaggcagaggcagaggcagaggcagaggcagaggcagaggcagaggcagaggcagaggcagaggcagaggcagaggcagaggcagaggcagaggcagaggcagaggcagaggcagaggcagaggcagaggcagaggcagaggcagaggcagaggcagaggcagaggcagaggcagaggcagaggcagaggcagaggcagaggcagaggcagaggcaggcagatctctgggactttgaggccagcctggtctatatagagcgtttcagcctagccaaggctatatagtaagacgtgcttcatatacatatatggttcaatgagagaccccgactccaaaatataaggtggaaagtgatagaagatgcccattgtcaacttctggtctccatatatgcacacatacacctcaagtgtgagcacacacagagatacacacacacacatacgtgcacactcacacacacatacacaagctgaaaggcaattagcaatggtgcttaaaggtagaacctctgggaagttatcagggttggttaacatcatcagagtggagttcctgagagactctccggcagaaagtccattgctagacaaatcccccccccaaacctcttttctttataaaattaccaaccttaggtattatagcagtgaaaaacagataaatataccaaatcctatgtctgttccctgttcctgcgtagcgagctgtttcttccaagtctctctggtctcccaaggaccaaactgtttctttcacttatcaaaatggcttgtcagcttgcagaatgaaattctccaaggttcacccaaagaatttcagattctgtgaggtgcgggtttaggggaggcagcaatgcagcatcagaactgtacatcagagaaaaatggacctgagactccaccctgcccttgaccctagagataagagacattaactaacagccagtggtgacaggtggcaccttccctttcacaccttagaagcagccaagaaaagagcccaagggggaaagaagagaaaggctttggaaaatgctgtatttgtcttaacaagagactgggaaatgagctgtccacactccaggcgactcagctgagcaggccctgagcccggcccttgagcatggtgtgtgggaacagctctgtatagacacggtccaccaggatgggaaaagaactcagaaggccccgaggtctggggtggagctggagagcctagaagtgttggggtgaaagagggtgtttggtaagatctgcatactcccaagtccctctgagctgagtgttccagcagttgggagagtctagaaagtgccctgagctcggcaggatccggccacttgggttcaagcctgagcctgctgattgcttccagctttgaacgtgacttcagatcttcctaccttccttccttgccctataaaccagagagtgggattggatactgtgtggctccttccagctctgcacttggccttgccaacatggcctctaactgcccccagccactcactctgcttctttgtggctcatttgttcactcaatggtctgcagagagaacggtagggtagaatactgaggccttaagtagtagctgattactttctgccttagctgacgctctcagaaccaggttgtctgtgcccttcacccatgcagtgccatggaaacttagaggagttagacacagtgcttggggcaaagacacgattcaggatgctctaataaagacttaaattagcatgaccaaaatggaagtcggtttatgtgtcacatcacaatctagaagtaagtgtgctggccattcagttgactccttttccaagttaaaggggcccaagtacttggtgcgttgctctagcacctaaaatggctccccagcagggccacagaaacaacttattccccttcctccactgattaccaggtgctgccagtgttaagtatctaattggctagaacgttgtcatgtggccacacactaaattgcaatgattcttgggaaatgtagtcctttcctctccagctaacctctaaggctataattaggagagagcagggaaatgagctatctcagcaaaaatcaaatgtgcaaactcagtgcttccgggcttcaaacatctgtgtgctggtagcagctgctcattaccatggcttacccaactgacgtgtgtcagaccagatcaatcatgatttctctcccatcttagacctctcagccggttcatttccatgcagtgaaccttgaaggactgacccatcttccgtccactggcaggtacaaggctctctgcttatttatttgtttctctttttgaggcagattctcctgtagccctggctaatttcaaactctctgtgtagatgcaggtgaccttgatcttctgatcctcctgcctccacctcctgagagatttgatggcagatgtgtgtcaccatcgggccgggtttatgtgatgctgggcatggaacccagagctttgtgcctgttaagcaagtattcgacaactgagctgcatcctcccctcccttctttgtctctttcaagattgacgacacacaattccataaatttctttttattatacgatgaaagcttgctttaaaacaccttcctgttaacagggattatcagaccacagcttttataaacctaaattagagtaaccctggaggttattgggtctggaacctggaatctactaaaatgcctactacctccatcccagcctgtggcaaatctctgtatgtaccggcgtcgatagataaagttgccaagattctcaacagaaagacgctttgccccatggcatcttaaggtggctccagaatcctgttaccaccatttctgctttcagtcccagggttctgtgtgtttagcctcatctttatagatttagcacctgtagtttgcatactgtgtggtccctgtttgaaacctgtatcacttcctcattagcctctgtgtcctatgtggtctgtgacggcccctgttggctcctgtggggtgcttgttaaagtgcgggttcccaagctctcaccctgacttcctgaatcacaaactctagatgttggccttggaataagtgtttttgctcctgggagaacccctgaactcatctttaatgggttgacagaatggttcaaaggcaagtgtggcagatccctgttgctataacagctgagtgtacatcacccactctgctcacagagggacgggctgcgtgtgtttcattctacttaaatatccatcgacggaaagggtggcatcatgcaaaattgtgtacagcttctttaaaaaaaatttttttaggaagcatgcagtgactgattggtgacacatcgcccttattctttgtccccatgtgtttttcgcccgcatgtgtgggcacagacaggggagaggaacctgaggaaagtgtgaaccaacaaaatgagaaaccacacagcctaagactgtgtggagcatctcagattctgatgaggtagtaacacctgctttaaaaaaaaaatccccaaagaaggagcatagggagggggtgaggcaggaagagggactattgccccctccgcccccagtcattaggaaaggcagctaatcctcaaggtcaaggatatggctggagggtcactggaaggatttcaggactcagcagagtccttgggagactagccgtttttccatctccatcctgcattctgggggatgggccttttgtccagtcttcagctctgactagaaatcattgtgtcctaactatgcccctcacagcctcttagtgacaggcctgttgtccaagatgcgcccgaggctggtccaggcctgtgcccatctattatgcagtaatggctggaacaaagctgcagtgtgtgggagctggcctgggtgaggcagtttccccacacggtcctgtttaccaggcactgggaggagagagggtccagtgggggctctgattgttaaaaacaggcttcccagtgaggtccctgagaagagaaaggcaggcagaatcatgggcgattgtcaaccttgctggttgacaagagttaagagagaaattgtccctctgcctcctgggacacccaggctttcttggtcattaacaggaactttataactgactctgatcccaatcagcccattcattccctggaatgcctaccgtatgtcctgagggccttgggcacccaagagaaaaactcagggtggtcccttgatcagagcaaacttaatcatccccacccccaccccctcaccagatcaagttgctccttgggtgactagccaggtcttgcttccctctgaacaccctaatccagaccatggtacagagcgtccccatggtgagtgtggaatgtagaagagtttctgccccattgctgtgtgcccacagcttagggaagcagatgtgacctgtgctaggcttttgcatcctccccagaccattactattactgttattgttgtcttgtgacactaggaactgaacggtgggaccttgtacatgctaagaaaatggcctctttctctagtcctttttctgaaacgggatctttgtcagttgcccaggctgcccttgaacacactaggtagcccaggctgaacttgaacttgcaactatcttctctcagttgcttaagcagctatgatgacaggcttaccctatcaagcctgcttctcctaaattacttatgctgaagttttcattccccaaatggcgatattaggaggtggggcttttaggtagtgatttttacagcacgagggcagagtcttcatgagtgattggttggtggagtgtttgcctagcatgcatgaggaggccctgggttccatacccaactctgcataaatggggcataatggtgcacttaggaagtagagacaggaagatcttctgatcatctatctgatcaaggtcatccttggccacatagagagtttaagaacgactgagaacacatgaaagcctgcctcaaaaacgtaactaaagaaataaaccctgtcaggcctctccccttcccaccctgtgagaatgcaactggaagtttccatctacacaccagagagcgggccctctccaggtaccgaaactcttcacatcttggcctcagatgtctgagctacccactctagaacaactagaatgggctaagccaagagagactctggagccccgcccgctgctggatgctgactggttgactggtggatggaagagatacgtgattctccaaataaagagaatggaggaattgtctctgagagaactggtccctgggtgatccgatgtagacagtttatgtacaaggcctatgccttcccccaagtggctttgtccacttcatgtctcctgtccttgggagaatcctgtcctgatagaccatccttgctcaggttggttagatgaattttcaagcccgtgctataaacagcccaaggagaggcataaatgggtcacccactgctggggacctctgatcagaccgcaaaccagggcctttgccccgtctctacctccaagttaccctatgtagtaatgggggctgggggagctaaggttctcaggggctgggtgtcactgaagtaaagcagtaatgggtagaatgggggggggatccctgggttcaactgttggagagagagagaaagagagagagagagacagagacagaaagaaaatctcgggcaggatgtacattgcttgaaaaagctcttcttgtcctagtttctttcagacagatagttagcttttttttaagtcatatttatagacttcaaaattttgccgtgactcccactaaaaagaaaggcctcgctcaaggtcgtccagcccctggtccctcgttgcctgacctagctgtctttgtcttgcaacattccctcacccaggaagctgtctaagggacccagatttaagatcctcctggatgccgtgggccattgtaagtcttctaagtaacgtctacccatgggacaggccatgagtgtgctgtggccgcctgtgcgacacagcacgcttggctgattctgcccacagcataagtgcacagaagacctggtttaccaagagcagggaactgactcttgtatgtggagcacctgtcatcacatgtgggagtcagataggcccacagggagacaggcaggaactggtacactgtgttcaggagtcacacggccagaagcttccaactgtgcaaatctgagaagggctttggagctgggttttttttttttcccagaaggatgtgtggaattcatggctgaagagagagcatgagtgttcgtatgtgtccatgcgcacgcgttctcggccaactagaatctgagatgacaaaggactttgatgggtgaagtttactaaaatgaaataacggaatccaacttacagaaagtcaagggagtttggagtttgaagatgtctgggcagaacacgtggtcagaggggttctatttttatctcagagaaatctctgaggtggaaggaaaggattttgaggggaggtgaaaggtaaaggaagggctcccattgtgaacacttcctagctgtttaacttacctctctcagtccttccagtcaaagccaaagaggaaggaagttgtaatctagcttccagaaggacactggattctgagaggttcaaaatggctgagggattgtcagggcacagatgtagcctgaggcccatctgcctctcagccatcacccttcattgcatggttctacagtccatggtggtcctggagagtttcagctagggaaccctggaacccagagacaagttggggagggatgggtgtgccagccattgcccttcccttcgtgtcagaagaccctggagctagccactgactcctgtctcttcagagggacttgacctgctttctaggcccttctccatttacaatctaatttgtccttcagtccctcgagggacttagatctgtctcagctccctggttagtctgtcccggacttcagttccatgttgggcctcctcgttcctacctatgatatgaagagtgtgtatgtatgtacaaggatccatcaggagagcaagtgagtgcaggttcactgttagcaagctcaggagagttagatcagatgagcatcaggccttttcctctctgtgttcccccactgtgctgtcccaaagactgccactttctaagcaataaacacaggggcttcacagtcaaccttagacaaacaaggactaagcacattctcctattcacacacagtagccttaatctcaaatccccacggaaaggcctgccttcctacggtgtctggaagggccctgggcaacggtgccagattgcagggttgaccccagagcaggcccctgcactgcagggttcagcgtcttcctcagggctcctgagatttccagctgacttagagaagtctttttttcttttttcttttctttttttttttttttggtttttcgagacagggtttctctgtgtagccctggctgtcctggaactcactttgtagaccaggctggcctcaaactcagaaatccacctgcctctgcctcccaagtgctgggattaaaggcgtgtaccaccaccacctggctgagaagtctttattgagcagctgatatgtgccaagcacttcatgaagccgcagaatcaggggagacctagggtgggtcctcattctccaggagcccttgttagtgctatggctggcattcagacttataaacctgccgggtaagaaaattactttgtggactgggagtgcaatccagttggtatggcaattactagcaggcagggtccgggctgagggctcaatcagtgtcacacaaaaaaagaaaaaggcaggcaggaagggagaaggggagacataatgtatgttttatatacaatgaatagataaatcaaaagctgtatcatgaatagaatttattatggttctactctgttttacaaacaaacaaagagaaaagacaaaacacacctactgggctgtcaaggtggcccatcaggtcaaggtgccagccactaagcctgacgacctggtttcatgctcaggactcaccaggtggaaggacctccacaagcacaacttggtgggtgtaccaacaccagcgtgtgtgtgtgtgtgtgtgtgtgtgtgtgtgtgtgtgtgtgtgcgcgtgtgcatataaactaaataaaattataatttaaaatttttaaatgctttttaaaaattactatctgaaatacatctttttggttggacaagctgctagtaggaggcgggcctccagtgtgagctgacagccagtatttcctgtgttggtggattgtttcattctgtactgcaggcaaagagagcaagaaatgggctgttttgattgagacatcagaggcgatccccagttcaagtggcacttgaacctgatccaaaagtgtgctgggaattcagtaaacagaaagggaggctcaaccagactgaagcccaggaacccgggctgtagacatgaggaggatgctccgggcgcaggaggcggggcttctggtcctgaggctcagtcagccctgcactggaggcccctttacaccttcgtgatatggaataaggatgtgaagactctgaagggttgtgtggcctgcctagggccatggtggaagagctgaatttgagttcaggcatttactttggggttagctcaaagaacaattggaatacacgttgtgattcttctctgtcattctctaggtaagatgaggacattgttttttgttgttgctttttggttttttattttgttttgtttgagaaagagaaatattctgatcaaagttttctttggggaaaatcacatatgtacaggagatgggctcgcagagacagggtcctgcctggagatcagacgtcaccaggtcagcagcttcggagacaatcaaccatctttactttccagtggtcctgaatcttcctaatgctgtgaccctttcagacagttccctatgtttgcggtgacccccaaccatcaaattatctcattgctacttcctagctgtaattttgctactgttatgaatcatttttnnnnnnnnnnnnnnnnnnnnnnnnnnnnnnnnnnnnnnnnnnnnnnnnnnnnnnnnnnnnnnnnnnnnnnnnnnnnnnnnnnnnnnnnnnnnnnnnnnnnnnnnnnnnnnnnnnnnnnnnnnnnnnnnnnnnnnnnnnnnnnnnnnnnnnnnnnnnnnnnnnnnnnnnnnnnnnnnnnnnnnnnnnnnnnnnnnnnnnnnnnnnnnnnnnnnnnnnnnnnnnnagaaatctgcctgcctctgtctcccaagtgctgggattaaaggtgtgtgccaccacgcccagcctatgaatcgtaatgtaaatatctgatatgcaggctattttatatgccacccccacagggagtcatgacccaactgtttgagaactgctgttttaggggcatatgtgagggcgttttctcctttgtcacctgctgatggaataaaaggaaagcaattcatgttccctttttcactctgtctgcagggaggctcagagcccctgtctgtgattcagttccaaggaccagttgagagccataactcctttaaagattcattttcactttgccttggctctctagtctcactgccctttaaccttaatctcatcatcttccttttcatgcaatataatatatcattttcctgcagtgtgttaagtaggccttatctaagctgggtgtgttagcacataactttaaccccagcacttaggaggcagaggcagttgggtctctgagttctaggctagcttggactacagagggagttctaggacagtcacatctacacagagaaaccctgtctcaaccactaccaccaccaccaccaccaccaccaccaccgtaaccacatgaaaataacaggtgtttgttttgtcttagaagaaattggaaggagagacttctgggcatctgtccaagtgtcagtcgctcacacagatgtggtccttatcttgaaggggcctccttctccttgctttttgaggaatgaccaaggaccaccagtgccatgtaagatgggttcagaggccaatgaatgtgctttggcttaagtgccaggcagttctttagtctatatcagcgatataaagtctaaacttgcttagaaggaggctcaggcacatgcttcagtttcagaacaaaaccacttaaagaaaggtttaagagctggagctatggtgtagagtatgttcccagcacattcaagcattgcataaaaacaaacaaaaggctgaaataaccatgacttaggggcttgggggtggggtggaagctcagtgagtaaagtgcttaccatgcaaacataattcaagatccagaacccaaggggaagtctggacatggtggcattaccttgtaatcacagcaccgaggatgcagggacaggagggttcctggggctcagtggccagccagcccagccacacagtgagctccattgagaggcctggtctcaaggctgctactgaggaagatgtctgaaattaacttctggtctacaaacacacaaccaagtacacatacagatacatacagagagagacatatacagatacacacacagatagacacagacacacacacacacacacacacacaccacacaccacagtgtcgaaacaaaatattatttgaattggtagaaatggtgaggcttggtggctatgccattcacatcatgacatttgaaaactgactaccaaactgagtccccaaaaggacggatctcgtgtttgtgagtcttgccagttattttaagctgtggagtgaagaagagttccccctcaaccccactccacagcctgagattaggaatcttctggcttgtgcaccttacttttgaatctttgtttggggacagtggttctgtcctcttaggaacaggaatgacatgaggtggtgacagaggacaggtcccaaagcctggctgacctccatgttcaggagattagagatggcagtggtggccacagggtggctgtggggacagtgtggagtgtgtgtggaggtgtactcagatggcgccctttctggatagggcatgtgacacagcatgcataatggtgaccttcacttgagtgtgaactgctgagccaggtgtgtttgagagctgccagcagctgggaaatcaagtgggcagttcggcctgccatttgctctgagtcagaaaggtctcttggtgtccccaggtcaacccgaacctgctgctgtcccagctctaactccttcaccaagcaactctcaacttctctcttcttttcttttccttatgtgtgcagttgtacattttcatgtgtgtgtgtatgtgttatgtatcttcatgtgtgtttgtgtatgttatacatcttcatatatctgttacattccttcatatgtgtgtgcatatatgttatatatctccatgtgtgttatacatctttatgttggatgatttcctcagtggctctccccctattttatttttaagatttatttattttatgtatgtgagcacactgtagctttcttcagacataccagaagaaggcatcagattccattacagatagttgtgagccaccatgtggttgctggtatttgaactcaggacctttggaagagcagtcagtgctcttaacctctgagccatgtctcagccccctccacctattttttttgaatcagggtttcctgtggaacctgagactcaccagtatgtctgggctgactggccagtgaactctacacatcgccctgtctcccctcccagcactggggttacaagcacgtattaccatgcccagattcttacgtgggtgctgggaaccccgttcctcatgcttgcatgccatacactttcctcctgcgccgtctcccgagcaaactctgccctcccatttctttaacatcttcaggaatgagaagttggccttttcccaccacagcccatcctaccactggacagcaccaactccattagagactagagtagctcactgcagggagagcttcaggggagacgccctacacccactgcaccatgagttgcttccacatgttggaagagcctccataggcaggctctgcccaaattccaggctgctgcagaggaaagggcaggcaggcagaggctctacccttgaggagcttcgcttacatgcctccgtacctggttttcacgtgggtgctggggatctgaactggacaagcacatcaccggcggcaccatctccatcctcagctccctgctttattttaacctatgaatccagtttgcatatcagtaagatatactgtgtaattagggtgacctcacgctccctattctcctgccttagcttccccagatctgggattgtctgaatgtgtcaccactggggttgcttagaacatcactgtaaggcagcaactcctctctcatacgcccctccctgtgctcaggacccctagactccatagggcagccaagcagaagctaggcctgctaccagcttaggtcctatgtcctttctcactacccctcccccaaacagaggtcattcgagaatcctggcagttggctcatgtgagaaaacttgacagtgtgacctccagtccagtccaccccacccacctccttgccccacccaacccatcctaggggacagcagtgggtgacgtcagctctcccacccaccatgtgaactgaagtcaatcaggaagactgggaggcagctccaggtcggtgggttaggttctagggaagaagaccagggaagccttctgtctgtctggaaaccctactgggagtttcgtcatggtctccagcctggtatcctgggaatggcagaggtgtgcaggatgactcgggggcacagcatactggatcccaggtctcagaaagccctgtgtgatagtactgtcagtttgacagggtctagaagcacccaggagatgagcctctgggcacgtctgtgggggagtttctagactgggttaactgaggtgggaaggctcactgcaagtgcctgtgtcacagcgatgatgcagtgggatcttggactaaagatcctaaggaggagaaggcaatgagagtcgagctgagtgcctgctttcatctctctctgcttcctggctacggatgtaacgcacctcaacagccgccttgtgttcctgctgttatgtcttccctgtgaacacaaacaaacctttctttcatctctcaagttgattgcatcaggcattttgtcatagcagcaacgagaagagtaaagactcatattcattgtggcacctgtcaggatgagctgggaggtgggcatgtttgagcccctgcaattcccagtgttagacccaggtagtgtctttagagtcatgtttattgagatgtaatttacgtgaagtcagagccatcccactttgggttccccatcccctcaggatcccatgctatgcttgtcacaaacacacaaagctaggaaaccgtccttcttaggagagaaagcgttttcctcaccatcagagatgccctcctgtcctgaccacaggtcagctctcctccctcccagacttgccacagctcacgtgtgttgtcttcagggttggggcttcaccagggtaacccagaaatggaattgttcagcctgtagttctcggctctgctcccttggctcagcagagaatgcttgggactcatccaggagctggagatgggcgacttgggcctgcatttcccagccatgtctcaatatgggtaagccctggttaccttcccaaagccagctttcatctcaacagaaccaccagccagaaatgcaatttgtctgatccacatgtagattggattgttccacattggctacgtcaaactcacaaaggtcaaatctccaacaatttaaagaaagaaacaaaaatttaaaacaaaacaaaaaccccaaaccatggattgaactcgggccatcacacttggcagcagactattgcctactgagccatctcacctgccctcaaagaagcttctgaggagggtggagcccctctcaccaccacctatgaccttagggtcagtgccaaaggaaggagaaatagagaggcaggcttcattttctgagaaatgttctggtgttctatggacatttataataacaagttattagcctaccaatcatatgcccagggccctccctgctgagcacccacctagatcagcaaagcaagtgcttctcttgctagtagctggctaatggcagacaagggtgtcctcctggcctctgtgtccacaatcaaggattacacttctccattcttgggatcccacctctccatcattccctagtcctgtctggagtttgctgggtccaaggagaccctgtttcctgtggggcgtggaatagaactgcagaaagggcagccgaggtagtcaggagcaccctgccacggggcgaggaaaatgatgtgtcaatggtcagggctaatggaggagaccccgggtgatggagccagcgaagagatgccaaggagccccagagtgtatgcaggaatctggtaaagtcacgaagctccacagtggacagacacttaggggtgtttaaatgcctgagaatgtatgtcatcaaggttgggagctcaggggcgtttggaaagttccttattgatctgccctgtccagttgtccaggttgtgcccagcagcagagcatctggcaggaacaagcaggagcctagatccaggctgtggctataaactgtcactaccactgtcagagggagatgcacacacttcctgttccctgtgtgctgaggtctcaaatgcatggaacagggtcaggagagacttagggtagaagccagtctacagggtgccagcagtgtggcgctcaggtgaccacacctttgatttgagagtatgggagggaatagccacagccaggtcagggaggagatggggtgtgtcttagttgccttcattttcctatgaagagacgccatgactaaggtaactgatttaaaccaaacaaacagcatttgtgtggggttctctgttccagggagtaagagagaaggtcatctattgttctcccccagccatcgtggttctgacccccgtgctgtgtaatgtgtgtgccaggcacaggctgttccgtcggctcgtcaggggcctcctcggatgggagggagggacgtggtcctggagagccttggtttcctgtgccctggcaggggaaacacctgcttggctattttttatttatttatttttaaatcctttcggtctgccttctccttgtgcttgcttcttgggttcgtgcttgttacctcctggcctcaagatggctgctccactccaggctttaccttgtcaaatgcaaacaaagacaggaagcagtgccttagataacgtgctgagaaagggcttttcttgtctgtctcttttcttttgttaattaaaaaaaaaaaatctttcccagaagcacacccaccccagcagatttcctctgcacgtgcatatacgcacatgcgtatgcatgcgtgtgtgcaggtgcatgtgcatgtgtgtgtgtgtgtgtgtgtacatatgtatgcaggtgtgggtgagcatgtgtatgcaggtgtatatgtatgtggaaacgtgtatatgttgatgtgtgtgtacaagtatatgcagttgtatgtttgtgcatgtctatgtgaatgtgtgtgtgcatgtatatgcaggtgtgggtgaatgtgtacatgtatatgcaggtgtgtgtgcatatatgcagaggtgtgtgtatgtaggtgtgtaaaagtgtgtgcaggtgtgtgtgcatgtgtatgcaggtgtgtgtgtgagcatgtgcatgtacatgcaggcatgtgcatgcatatgcatttaggtgtgtgtctgcatatgtatgcaggtgtatgtgtatatgcatgtatgtgtgtgtgcatgtatgtatgcatgtatgtgtgtacatgtgtatgcaggggtgtgtgagcatgtgcatgtacatgcaggcatgtgcatgcatatgcatttaggtgtgtgtctgcatatgtatgcaggtgtatgtgtatatgcatgtatgtgtgtgtgcatgtatgtatgcatgtatgtgtgtacatgtgtatgcaggggtgtgtgagcgtgtgcatgtgtatgcaggtgcactcaggcgttactcctcgggagctgtctgccttcttatttgagtcagactctctcattagaacttggggctcaccaattaggctggcctacaaaccccataaacccacctgtctccaccttcccatcactagaattagaagctcattccagcatgcccaagcaaatttttttgtaaacaatgattctagagagcaaacacaggtcctcatacttgtttggcaagcactttactgactggaccatctcctgaggccccatgtaccccatttccacagatgagaacacagctcttagagttaatgagcaagtacaggtttgtaaggcagtgctggggtttggagcagctatgcttgacgttagtgtccctgcacagccttgatgctgacaggtgccaactgatggttctatagagaagttacgttctactaactccaaagcttagccagactccacagcccatatgcggtgccagggaggtggcagctcagatacagggcagcatcccctggagggagaggcttcccctggagtttccaggaatgagccacctctgctagccaatgtggccaggaagctggaacagctgagagtggctggagttgagcagccccatccctcagtacctctgaagtttgctcgaaacacactgtgttgccttcagtcaggggtagtgagtggctggaggccaggcctcctgcctctgagagcaggaacttctgctgcagagccggcaagttctcagagcttcctggctgtcttgtctgctcatctcaacctctaggatgacaatggtggctctgccctgtcctctggcacttgggacccttctttatgactccagggacaccatttacactgtccctttaagcagtgtgcaaccttcatgccccatatgatccttcccaactcctctgcacaaagatatggacaagctctacctgcaggtgaccagggtaaatacatgtgccattagtaaagccagcctaatccacattatcatgtgaaggctacagccttttaggggtgatatggcttctgcttggatgtctgcagaaggacaggggaaagatggccccttactctataccttcctttaacatgttctggaaggtgaccactgaagtagccagtttgtcccatcttgggtgttttttgtgcatctgcagttgactaactcctgtttcattttcctcctggctctgttagcacgatctttttctcaacagggcctttgctagccttgatgggccctagtctcaatgagtaccttgcccaggctcatctaggttcctcatggcctctagtgcccctgccttgttcctcacattgaatcttcctagtggctgatagctctcagacctccacactcatcagagctatataccaaaggatgagtgctggacttccctggctgtgccctgcagccatcctgattcacctaagctaagtagttctcaaccccttcggtaccatcagaaaacacagatatttaccattacaatttgtaatcatagcaaaatcacagttatgaagtaacaatgaaaatagttttatggttagggggggggggtgtcaccacaacattagggactgtattaaagaattgcagcattgggaaggttgagaaccactgacttaagccatcttttcctcagccagctatgccaacgtgtcctctttccatccatatctcaacctggaagtcccagagtctcctgtcccctcgcaccacctccaacccacatagcacattaaactgtgagtcactggcccagtgtccctcttgcccctgcaatcacagcctgccagaggtggcttttgactcctctgagtgtaatcaggacatctctaggttatggtggcttctctgctgacctcacgcggaggccaagctagccaagccttctggcaataaacctacatctgagcaaatggctgttgcattgctgagcactccctgtcaggtgtcagagctgggagtacttgaacactactttagcagccccacccttctctgggtaagtgaaccctagttcttagaaaagcaatggtccaagttcatgctgtcgccatgaccaacactcgtgaaaagtgacctacaggaggacagggtttgtttcaattaatggattacagtccatcactgaggacttgaagccaggcctgcttgctattccacacagcatctcctctgacagaggaactcgctccacacccaggagcaagtagaaggaaaagggtgctctccggctcactcggcctcttgcttagctagcgttcttatacagctcagaaccacttggttagggaatggtgtagccatcattgggaacatgtgaggatcagagtttggatccccaacacccacatatataccaggtggacttgggggaatctcctgtaattctaggcttggaaggcagaaatggggatcttcagagcaagctgcctagggaaactagccatatcagtgagctctgagtttgatttagagaccttgcctcatcaaataaggtgagagagccatgaagggtgattttaccttgggcctccacagtacacagacacacatgcgcacacaaaccacaccaacacatacagacacataccacatcacacagacacacatgcacacacacacacaaaccacaccaacacatacagacacacatcacatcacacagacacacatgcacacacacacaccacatcacacagacacatatacatttacacaccacacacatacacacacacatcacacacaccacacacagatgtgtatacacacatacacacacatcacacagacacacattcacacacacacacacacaccacacatatacaacacacatacatgaaaatgggaaaaatataagcaggatggttggctcctgagaaattaagtatctagtttgtcccatcttgggtgttttttgtgcatctgcagttgactaactcctgtttcattttcctcctggctctgttagcaagatctttttctcatcagggcctttgctagccttgatgggccctagtctcaatgagcactctgcccaagcccatctaggctcctcatggcttctagtgacctctgacctccacacacccatacatgcactctacaaacatacaaggatggagacacaaagtcagtttctccctctgcgtgcctctctcctctttccttcacctggctcaatgtgccttcacatatgcccttcaagaggagcagctggttagcttgccaccctccagagaaagccactctctctgacgagtactctgagctgaaaggccatgtgaaacacaacacagtccctacgatgagtttgtgttccttgtgagttgggggagtgagttcaggaattgttggccaaggatcataaagatgccccttccttgctaattcagattcttcctgcaaggcagagagtgccaagcagagagcaccaagagtcaccacgggctttctatacaaagccccttttattttctcagcaacatgaagttcaagcagaaagttgcggctccaacttcaaagccttcagctgatgaagccccttaaagccttcccaaggcttaggaagactctctctctctctctctctctctctctctctctctcacacacacacactcacacacacacacacacacacacaaacacacacacacacacacacacacacacacacacacacacacggcacatggctcagcaccagcttctctacaggcaaagtgactcgacgcctactttcctacctgtgattgacagtgctgaagagttctaattattcagactgctgacgcacacttcctctccccaacagagatgtcacagctcccgccagcaaggcttctcccacttagtggtaaccttaggggaaggggcaaccaagccctgtcaccaagtaccccagagacaccttattgcccccccccctttttttcccactgccaattgacagggagccaagctctttgtctttgtagccacaacttggaggccaactggctatagggaccagagtgtagggtccagtgtgggaccatggagccagagagagataatgtcattccctctaacccctgggcggcacagatgcccactgcccagcatgcacatatggtgcaccaatcatttgaaaggcttcccaacctaggtctacatgaccatagccattgtagccttgctgtgtaccctggcctggagactcccagaactcatgatgcttcaagaggaaggactccttaccctgggggctctctaaacacagagctccagctcttacagagtgaggagcacttttcgcagatagatctgccatgctcaacttttagcctcagctgtgaactaaccttgtttagaaagtgactctgtatggccaaacgttgagagttcaagaccagccaaagctacatagagagtccatatcaaaaaatgaagaaatactaggggctacagtggcagagtgcttgcttagcataaatgaagctcgaggttcggttccccagcagagcattaattaacgtgtgatatcccacacgtgtaatcccaacacttgagagatatgggcaggaggatcaggagttcaaagttatcctgagctacatattaaatttgagggcagcctgggctacatgttctagaaagaggtgggggaggcagagtgccagcatctttatcaagagccagtcacataggcgtcttgtctgtcactgtacctgagatctgggagctgggccaaatagagagagggaaaaggacagagagtgggagtgagcaggaaaaaaggaaagaggggaagggggaggcatctgcagcgtaggtgatgtcagctgaggcgtgcagctgaaggctccccaggagcatcttgggtaaatgtaggtgtgggaggctcaggagaggtagcattccttgtactgggcatgagctgggcatcttggcgttgactctgcctgtgtccggtgggtgaggggaaattaataagcctccctctgtaagagcagatggaggggcacagagatgttcagaggcttgctcaggccacacagccactctgcagtatgatgggactagaatgtaggtctgtgtagattccagtccaggcttgtcatccttctcttgaagctcccaggaggcctcacggtgtggtcttcactggaaataagcatatctcaggacccagccactggatggactgactgaccctgggaggttatctgagctatctgccttccactgggtggggctcccttgaggatgtgggaggggctggcctatcatcaggccaggatcctaaagggacttcctgactacagaaccctgctgggcaggccaggaacagcattttggagctcagctctgctcagaaggccctggtcccttttcctgctgtttccaaggggaacccggctggccaaggagaaccaaggctgagggcgataccaggagcaagaacaggtctgaggtcagctgtgaggctagccttgagactgagctgtggctgggcaggaaaaaaagggcatgcccgactggcagaagctggaatgagcaaagacagcaccttcccgtggaactggaatttagaatattgtactttgcagggacaacatgatttctataatttcacagtgggatggctctctaagcaggtgacagacctgtagtatatctttcacaccatatttttaaactgatctttcctcctcctcttcctcctcctcttcttcctcttctttctttacttttcccctcattagcattcattcacaatagcatctgtgacatcaaaggtctggaatatgtgttaatttttttctaatgtattaaaatagacatacagctgctaaaattaaaccttcatctcccagcacttgggaggcagaggcaggcagatctctgtgagttcgaggacagcctggtctacacagtaaactccaggacagccagggctgaatattgaggctctgtctcaaacaaaaacaagattccttcttgacatcttggctaagacccagtgcagagcttgtgagccaggtgtgtggtcattgctcagaggcaaaactgagtgcctgctgggtgtcgcccaggctgagctcactacaagattggtatgggcttccctgcaaaaggcagcagcccatagaaggcccccatagatcctccgctcaccctccaaatgcttcaaaagtcgaacctgctgactgctcagagcctaggctgtgaacactgggtgcggtcggctgaggagggccttctccattctataggacaaggactctcgaacttcagggtgcttctgtgtcatttgggggtgtgcaaggggacaaggacactgagtcagcttgctgagtgttggaccacactgctaaaagattgcagtggattccttcggcccagagtgggacctgggagctgcattttcaagaaatgacccagaaactcagtgacctcccacaccctcagtggttttgacatgagtgatcgctgagtcccactttgaggacttcatcccagactcaaaagtgcttccccttccagcacactcagctgtgtggccttgtctcagtcacttagcctttctgtgcctgatgaggacagtgttggtggcaatggtgagagcacactcgttggggagagattctaaaaaatgcggtggcttgcgtccttgagcataaggtgatgttcgctccgtccccctctccccacaacaccccttccccctgtcactgacattgtccttaatcataaacaggcagcctccttaacctccagggctgagtgagatgagtttggacagtcagaacactgtcacatgtgtggttggcttactgtttcgcacgtcattatcattggtagagagaggaccctacactctttctagaagatctgttgggcatgtggaccatacgcaggaatgttgtgaacaccctcatgccaggctctgtgtcaccaagaccttctaggcaagcagccaagcacatgataggtcccatgctcttggtggttctaacacctctcatccatccgtgaaaatgggtgggcccaagggaccccttgctcccctcccctctgactctccagtgccctgtccagctccttcatgaagtagtagtcagcctaaccccgcctcttctggtcccttacagatgtcctggcgaccgcagtaccgcagttccaagtttcggaacgtgtatgggaaagcggccaacagggagcactgctttgacgggatccccatcaccaagaatgtacatgacaaccacttctgtgcagtcaacgcccgcttcctggccatagtcactgagagcgcaggaggtggctccttcctcgtcatccccctggagcaggtaagtggccctggttgccctgagattctgattgagaacaaggctggacctgggaggcttgagatctgttggtccctgcctggaggactggatcacacctgtctctggggacagcttgggcgccgccattcgatctcggtgtccattttggtatagaactgggggacagcagggacagctctggatacttttggatctgcataaacctgtacacttagggaaccgccctctgctgggagactggctgccatctgctgggccctggtgcccacttcctgcctggaggctctcactaccgggctgcttacgtgactgccgcaggttaaacccccaaagcttgctgctgcggattttgtcgatgtagccattcaggcacagtcccaggaggcccgtgggaggtcacgcgcctcaggcaaagtgcttgctgtccggtttgcttgtttatgcctgagttcccattcctagcctgactcatcccagctctgggaggaggtgctcatattagaaaacactggttctagaaatgcagtcagctggtggcgggacaatttccaggctttcctcccttggagggagcacagctttggggattcataggacaggtctctttcccatcacagggccagctacaatgtccctgaagacaaagctagatctcagaaagttctaaggagcagtgacttagaggctggagatatgggttttcccactgaccagccaagcggccttctggatgtctctcaacgtttctgcccttcatttccctgtactgataaagcagggtcatagctcctcatatatatatatatatatatatatgtatatatatatatatatatatatatgtgtgtgtgtgtgtgagatgtgtgtatgtgtgtgtatgnnnnnnnnnnnnnnnnnnnnnnnnnnnnnnnnnnnnnnnnnnnnnnnnnnnnnnnnnnnnnnnnnnnnnnnnnnnnnnnnnnnnnnnnnnnnnnnnnnnnnnnnnnnnnnnnnnnnnnnnnnnnnnnnnnnnnnnnnnnnnnnnnnnnnnnnnnnnnnnnnnnnnnnnnnnnnnnnnnnnnnnnnnnnnnnnnnnnnnnnnnnnnnnnnnnnnnnnnnnnnnnnnnnnnnnnnnnnnnnnnnnnnnnnnnnnnnnnnnnnnnnnnnnnnnnnnnnnnnnnnnnnnnnnnnnnnnnnnnnnnnnnnnnnnnnnnnnnnnnnnnnnnnnnnnnnnnnnnnnnnnnnnnnnnnnnnnnnnnnnnnnnnnnnnnnnnnnnnnnnnnnnnnnnnnnnnnnnnnnnnnnnnnnnnnnnnnnnnnnnnnnnnnnnnnnnnnnnnnnnnnnnnnnnnnnnnnnnnnnnnnnnnnnnnnnnnnnnnnnnnnnnnnnnnnnnnnnnnnnnnnnnnnnnnnnnnnnnnnnnnnnnnnnnnnnnnnnnnnnnnnnnnnnnnnnnnnnnnnnnnnnnnnnnnnnnnnnnnnnnnnnnnnnnnnnnnnnnnnnnnnnnnnnnnnnnnnnnnnnnnnnnnnnnnnnnnnnnnnnnnnnnnnnnnnnnnnnnnnnnnnnnnnnnnnnnnnnnnnnnnnnnnnnnnnnnnnnnnnnnnnnnnnnnnnnnnnnnnnnnnnnnnnnnnnnnnnnnnnnnnnnnnnnnnnnnnnnnnnnnnnnnnnnnnnnnnnnnnnnnnnnnnnnnnnnnnnnnnnnnnnnnnnnnnnnnnnnnnnnnnnnnnnnnnnnnnnnnnnnnnnnnnnnnnnnnnnnnnnnnnnnnnnnnnnnnnnnnnnnnnnnnnnnnnnnnnnnnnnnnnnnnnnnnnnnnnnnnnnnnnnnnnnnnnnnnnnnnnnnnnnnnnnnnnnnnnnnnnnnnnnnnnnnnnnnnnnnnnnnnnnnnnnnnnnnnnnnnnnnnnnnnnnnnnnnnnnnnnnnnnnnnnnnnnnnnnnnnnnnnnnnnnnnnnnnnnnnnnnnnnnnnnnnnnnnnnnnnnnnnnnnnnnnnnnnnnnnnnnnnnnnnnnnnnnnnnnnnnnnnnnnnnnnnnnnnnnnnnnnnnnnnnnnnnnnnnnnnnnnnnnnnnnnnnnnnnnnnnnnnnnnnnnnnnnnnnnnnnnnnnnnnnnnnnnnnnnnnnnnnnnnnnnnnnnnnnnnnnnnnnnnnnnnnnnnnnnnnnnnnnnnnnnnnnnnnnnnnnnnnnnnnnnnnnnnnnnnnnnnnnnnnnnnnnnnnnnnnnnnnnnnnnnnnnnnnnnnnnnnnnnnnnnnntatgtgtatatatgtgtgtgtgtgtgtgtggtctgtgtggtctgtgtatgtatatatatatatatatatatgtgtgtgtgtgtgtgtgtgtgtgtgtgtttgtatgtggtgtatatgtatgtgtgatgtgttagcagtgtgtgtttgtgtgtgtgttagagtctgagctataatgcatgtgtggggtcaaagtcacctttcagaagccagttccttccctctatcatataggtcccaggtaatgaattcaggtcatcaatggttggcagcaagccccttcatccactgagtcacctcactggcactgggagaaccttttaaaagtcatgctgtgtgaaaaggcttggtatgtcaaagcatctccccaaaccgtcagggaagcaatagatacaatagaatgcatttttaaacaactaagttcctgtactacagtgaggcgctaaacaaagttaaaaggaaacccgtgctcgagcagaaggttttcagtacataacaaatgaaaggttgtatgtggaacacagaaagtttcagaagaatcagtacaaaaggaaagtgaacaaaagacctgcataagcaattcacagcagacggacattcctagacagaggaggctgtggagtggagaacacagactgttttatgtgaaccagactgactgtgcagccctggggagagatagcaccagtaaggtgccaagaggtgccagagacccctgttcacctctgaagacacatggctaccagccagcgttccatctcgggaatctgtccagctggactgtcctcaggagtatatacaatgttagcagacatttgtggaagcacaagcctgtgatcccagcactgggaagcagagtggggtacataccaagttccagaccagctaggactatagcaaagctgtgtcttcagttaacaaacaaacaaatgaataaatgagatgtcacacatggtaacacacatctagaatcccagggctcaggaggccgaggcaggaggatcacatgtccacgcctgcctgagctacacagagaggcactcaaatatgcagattaaaagaaaaattgaaacagggtctcactatgtataactctggctgggcaggaatttttttatgtgaaccagactgacttcaactcacattgatctgcctgtctctgcctcctaaatgctgggattaaaggtgtgtccaccttgtttgcagcatttttaacctccagacatcaccaccaccaccaccaccaccaccaccatcaccatcatcatcatcaaattcaccagttaaaaaaaaacttctctgtcaagttgtgtcttagtgttacattgctgtgaacacacacactcacgcacacacacacacacacacacaaacagagagagagagacagagagacagagagagagagagagagagagagagagagagagagagagagagagagagagagagagctggacctagcataggcttttgaaatttcaaaacccacccccatacatcctccaataaggccacacctacttctcctaaacctatcagagttccactcctgatgattaagcactcaaatgcatgtgcttatgagagccattcttatgcaaaccatcacaagttgcttaaaaacttccaaattctgtactctgttgagacaagttgccctccctgaaaactgatacatacacattcacacacacacacacacacacacacacacacaccctctcaacctcatctgtttaccttcctggggtaccactcatggggaacaggtaccctgattcacaggcatgctgtaatagtgaaattttgcatgcaccctgcaggcctggctcccttctgggtcctgtactcttcaagacaggccctattcagcacagtctccgatcactttccgcacttgcggatgagagaaattctaaaaggctttcctgtgcatggattatatctgtcatctgtgagtgtgttcatcacaaacatgaagtcggcttgggctggggatgtagctcagttggcaggatgcttgtccagcgtgcaggaggccttggtctcagtacccagggctgcacggacacagtgtggtggctcacagcacaggcttgtagtcccagttccccagaggtgtgagggtcagaagttcaaggttattctctgctacagaaagagtctgaggctaccctgggctatgtgagaccctgtcttccaaactagaatctttaaaatgtgtatcaatgaagtaaagtcattgcaaattcatttcatgtttcatgtcctgggagacatgtttttatgaaaaataatattttagttaaaatagttaaaatattttaaaaatagccaaaaaagttaacgggggggggggagttacgagtgaggctgggtggtagagtctagcgtgtagaaggctctgggttagattcccagcactggaaaaaaaagtgaatgagaagaacggcattgttttctacttttccaaatccctctggcttgacggagcacagctggactctcacctctgcttctgcattcagtcctttgctgtatcgcatgaaaagttgctttaaaaagaaaactcatatactcttgagagactaggcaaacgggaatgtggtgtttgaaggctatgccgaaggtagttttgatttcatgaattccctgaaaagtcttggtttttatttacattttatttatttatgggaggagcctgcaggtgccttggtgtgcacctgaaggttagaggacaacctaccatagctgcttttcttccgacatcatgtggacccagaaatcaaactgagtgccttgagcagctaagacatcgaattggtccctgggaaggtcttgagaggcccagtcgacctcagaccacattttggaaatcactcatgcagaaggacactaatgaaagaaaactatttgtgatttgtaaaaaagtatggttggtttcattagaaacaccaatgtaccagagatagtggtgcacacctttaatcccagcacatgggaggcagaggcaggtggatctctgtgagtttgaagccagcctggtctacagtgtgagtacaggacagccagggctacacagagaaaccctgtttcaggaaggggaaacaaaacaaaacatttatatacctagaaaaaccaaaagggcgttacttagtgatgagttctacttttaaaatttttcttctctctctatgatgttgttttataatgagcacttaaagcattcctgagtagaaaaagcattgtatagggaggaaaaatggagagctgagaatataactcagttgggcaagtgtgcctagcatgtaagagcctgtgatccatcccttggtggtacatgggagatggaaaagtccaaagtcatccttggctacataacaagtttgaggccagcctgtcggaattcagggagatcagccccatcttccaggcatggaaactgaggctgcagagacagcaggagctggattcgaggtcagcagcttccagagctgctcatcaaaaccagctctcctacttctgcatccacaactgcagtaccatgatgccgactgctgatggacaggcccttttggctctgggtgggtctggaggagggaccaatcttctcagactcttgttcagcctctgctatggtagccagcagctgatttttttttttttctggttaacatgcagctcccggctcccacctctcaggggcagaatgttaagctgcagatggaccagtagtcagcgccctgattgcctggctcagctgttggggcttcatgaatattgcagaacctaggcactgtgcccagcacctcattaaccatccagccacccagtgccacacccctttcttgctgcactccccagggctgaaccaaaccccaagaagaccagggctggaagcacaggtccctgccagccaccaagtgtcagctggagggaaggaaggaccctagcctggatgccaagtgtctaagttttccccagagccaagcagaagctgtacagcagtctcctgtactttttgagagtgtaactcactgtgaaaatgctgttgggttttttcttcccattttacagaggaagagacaaaggcacaaagaaatggacttcccaattctgcacagtacatagcccaaatttaaacccccagatctctcagatgcatgcctagtcacctcacagagggttagaaagcactttgcagtcttcgcctgtattactgtggttggaatacagaattcttgctgcctggctctatggaagccactgagcagagataggaattgaatccagctgttggggaagccagaggtctccatatctgaatacacctttccatgacagctccagtttgtatattctacaccagaacagaggcagtctgtctatcatccattccaaaatttagttgtgtctctctgggctggttgtcagccttgtctctctcattatctcttcttcatatttgtataccttatgaatctctctcctgccaggtggtgtctggctttaatcccagcacttgggaggcagaggcaggcagatctctaagttcaaggccagcatggtctatagagcagttccaggacagccagggctacacagagaaaccctgccttgggggaggtgtgtgtctctctcctgtctctttcttcattttccttattattgtgtctgcgaatcggggatttccaaatatccaaggccactgagtctcatctttctcctgagctatttacagtgtgtatgtgcaggttccttcctgcaatccgaggtacagatgtgatcctataatatacagtataaatgtccctgccactgttactccaaggagcttctaccagaggccaggggaccaggtgggggaatgaagcattagtgccaattggcaaggagagacagggaaggggtcctggagaggaagccagacaagttgacttaagtccttcagccacagtgcaaggactgggtcctcaggactatgctgggagtcttgaattcatgtgccttcagatctggtcttccaaagaccttgtgggtatcccataggtggatccagtgggtaggcctcaccagatgggccatgcccctggctccgggcatcagtcttccttcgtcaggtggataagcatttggatttgaatcaatagtgctcccactagtgggtagcaatggtggggtgtgattgcaccctccatacacgggagcctctggctgacatattctcagctgtcattcatctctgggtggggccaaactcacagcttcactgccgcttgctcagcatgccatggctcagtctgctgagacgttgcttccttctggttttgggtatcagggaaatgcaacccacaacctgtgacctgggtttcactggtctaagtcagcttgcactatgttacgtgacactcctgcctctatctcccaagtgctgagattgtagatatagcatacggagcctggctccatgatctcctcttggcttttctttgtctgtgatcttgggaggcagcacaatccaccaggcagtcggaggtcagtagagctctggagcaggggagcagctcagatggctccaggggcagacacctgttccagtctctgtcatgccactcaggtgctgggtgacctccagagtcacttcctatgccctggtctttctgcccacaaattgataaaattggaccccgtgatctatagaactcagtgtagctcttacattctggcacttgctaaccccattttattcaaagatgccttcaccagtgttgcaagtcagtgttgtacagttcacaatgatggctgctccctctcaagaccaatctcaaatgccagctctgtgaaacctttccagcccaatactcagcagcagattgtctgtctcctctgccagagcacttgcctgactctttattcatcgtatggttataccatctacctgttcacccatccacccacccatctaccagttcacccatccacccacccatctaccagttcacccatccacttacccatctaccagttcacccatccacttacccatctaccagttcacctnnnnnnnnnnnnnnnnnnnnnnnnnnnnnnnnnnnnnnnnnnnnnnnnnnnnnnnnnnnnnnnnnnnnnnnnacccatctacctgttcactcatccacccacccatttactcaaccccaccccacatacccagtcatccctccatccagatccatccagcaaacacttattgagcacccactatatttcagtcacagctcttacccagtcatggtggcacatgcctttaattctagcattcagaaggcaggcagatctcggtgagtctgaggccagcctggtctacagagtgaactccagatcagagtaagaccctgcaaaaccaaacaagaaagggttcctacaacagggatgagtgtaaacaaggccgggtccctatccatatgcagttcagtatagttgactgctgtggaggtgaggacgtgtctaatttgcacagtggcaaaggaccagcaatggatgggttcacacctggcaccttgcactgacctgaggctggacccagaggcagggtccctacctccccttacagactgcctgctgacccagcaggctttactatggagtcatctaaaagccactgagccgggcagcaccatggctcagagcctgctaagatacccagcctactgccaaggaccacagtgaggtcacccttcctgctgcccaaaccgctttcatgcaagatcttcttagcttaccaccccctcccctaaattaggtctgaactacttcccacttagacagccacccactcccaccctcccttctcccagggaattcagagagcttttccaaatccatttccccatctttcctcagtcatcctttgttcttcaagctgccttccttcctcttggtgtaatttgcatctcaaagcttgtgacaggctgagtacagtaggtgactttgggaaagggggagacttggagagaaagagagagagagacagagagagagagagaggctgcattagaagtcccaacttcactgcattcgtctgaggcctgagattgacagctttgtgtttttcccttttttggaagaatagctgcttattttgggaggaggggggaggaaaggcgagcccttcctcagagatggaagtgtctctcattcattctatttcagttatgagtgagatgaggtactctctggatttgggggtgcccaggacagggatgcagcgtggctagagagtattcgggggagtctgagaatttgtctgctgagccagcccctgtaccaaaaaggccttcgcatcttcccattccccacaaagccaaagtctagccgcaacagcacctgcctcccagggaccatgaacctgcagggccgaatgcagattgtggatgctccctctggacgtgaagccttttcctagtctgatttactccccattttctgaggcatttggggggtcatagccccaacccctagttgtactaccctagctactttgcctcagtttcccagtgtgtaaaccttagtgttccttgtttctcagtgtgtcatgatgattaaatgaaacgtctgacacccagtctgccgcacggcgcgtgctcaataaccaggagctaccgagatgcaaagacttctgctcatcccctctcccagccatggccactgagctttggtggggtttgaagccaggaaaggggaggcctgactggaactgtccccaagtatctctgtccatgggaactcaccgcccagagaagcatacatacacgcgaatccatttttgtcccaagggggattgcagagagggagttaaggggtccaaggtcatggctgccatggctggatgctggaaatggaaagtttgaggagcctggtggtgcccctgcagggtgagcttctttgaggagtggctgcctggtcgcctggcttacaaggttagggcacagaagggctttagtgcagtctctgggtgcagtcctcaggcctgtgcttccatcctattgcaagataaactccgggtgggtgggagaaaaggggtggggtcagggcctctcagaacctgcacatggcagccaatcctgaatctgacctgagttggagattctctgttctgagatggcctgatgccgccgcaggatcctccctgtgcacctcactgagtcccagtctgaccccccaagaggtgtgtggtcttgaagagtgcatggaacacctgggcactccctgtctcctttccaggaattctgtccttgatcccttctgagaattccatgtccctctacaaaggtgttagagaggacggtatcttctccagggagcatgcactaggctaaggtcaggagtcccaaaggagttgctgacgaaattccagatagcagtgaattgtgccacnnnnnnnnnnnnnnnnnnnnnnnnnnnnnnnnnnnnnnnnnnnnnnnnnnnnnnnnnnnnnnnnnnnnnnnnnnnnnnnnnnnnnnnnnnnnnnnnnnnnnnnnnnnnnnnnnnnnnnnnnnnnnnnnnnnnnnnnnnnnnnnnnnnnnnnnnnnnnnnnnnnnnnnnnnnnnnnnnnnnnnnntgacataggctttacacgggtggggtggaaactgaatatcttcccagggccccatgggccctgaggcctcagcaagacttctaccctgttccttccctgtcagggaacaatagttgcctgtgtgcctctcctgagaacacccaggccagggctagcctgggggcactttccatttctggatgtccctcttcaggcccctgcccccacttccatcccaaggcttttaaagttatcctgacttgtggggggagaagaatgggtcagggcatccacagactctcaaaataaatgcttgctctgagccatccgctttctctctagattctcctctgccccctcccagttgtactcatcaaagaccttgatttttagttgctaagcaacttgtgcctaaatttccaagtgggtcttcaggtgaatacaggaggaagaagacgaggaaaaaatgtttaaaatgatacagcttatgtgaagatgccaaggccctgagaaggtgggagacttgatggaggttgcacagctagttagtgtatgtgagagtaagtgtgtgtgtgtgtggggggggggcagatgttgataccaggtatcttcctcaactcctctctactatatgtatatagaaatggggagaggcatgtctcttacttaacctggagctaggctagaccggctggcacaggctagaccggcaagcacaggcagtctcctgtttctgcctctctagcctgaggcttcgggtgctcaccaccacttccaatagtcacatggggcttgaactcgggttcttatgttttatgaactcactcatttccctagcccctggcctttactatgagaggcacccaggtggcaccagcactccggggacctttcttattaaagtgccatctgcctcaataggaaggattgggatgtgcacagtgggaatcaggcatagaccctttggcattctaaagaagttgcagagctttccatagaacaaagttgaaagagcataaaccagacgaacagaaggaaagaaacaggctccattcaagaagccattatatgtgtaccagcccaacgaacatacaaggtagacctttcactgtggtacgctaaagaaattcaaatgatcggtaagaggcaggggcagggggctggagagagggctcggtggttaagagcaccgactgctcttccgaaggtcctgagttcaaagcccagcaaccacatggtggctcacagccatctgtaatgagatctgacgccctcttctggtgtatctgaagacagctacagtgtagttagatataataataaataaatcttaaaaaaaaaaaaaaaaaaaaaagaggcaggggcatagctcagtggtaaagtgcttgccaggcctggtgtttgtggggccttgggtccaatcactaacactaacactaacactgacaatgagagagagagagacgagagagagagagagagagagagagagagagagagagagagagagagagagagagagaataaacagtattttgaagccatagcagaatatgacctgaatattttatgctgcctaccaatggaactgtcacagcctctgccaatctcagagggttgtttctatatttataaataaaaatgtatgagacttcagggctatgcttaagaaaacataccttcgattttcctcagaaaactcattggtgttaatgagtttgttgacccacccaagttaaatgccccagaaacaatctcagataggacatccctcaataacagagactgccagagatgccctagatgaaggattgtgggaaggtagcatggatggtctcagtgccccacaccccagacgtgtcccaaaatgcagagctgactggcagtcagaaagcctgacttttctctcgggttctttggagccttgggtgagtcctttatccctctgggcttcaatttccctctctatagagtgagtgcggtggtcctccagggtctcactggctctgtcttctgtagagtgagtgcggtggtcctccagggtctcgctagctctgacatcctggaaatctgcgtttctccttcccggagagccgaagcccagaagcatgagaagcatgggtgtttgcgcaccctggaccgatgagtaggaacagctggggccaggctggctggctcccaattgttcaagggaatggaggagggctagatagggacctctccaaagtgacagctgggtgagcctggctgggggcctgggccacgcctgccatctgggcctccttcctgccttccctgcagggcggtgggggtgtggaccaggccagggccagactgcagcctggaggaggggagtgccagtctgctggcttgaggatgttaactctgtcatccaggtcttatacaattctggagaggaagggacccgccatcccaggtccagttaggccacttggtcagtgggtaacttccggatattgatcatctccttccactgtgtgggttccactccaggaatctaactcaagtcttcaggcctggctgtaagtgtgtttactgactctgagtcttctctttgcacagcccttccccaccagcatctgcaggcagaagcgccgccacctggaaccctggctactcacacacagccctggtttccagatgcagagccttcttcatgtagcttaatcctcaaaagcaaagcactcagatcctccatgggaaggtttccccaaggtttacacacacacacacacacacacacacacacacacacacacacagagagagagagagagagagagagagagagagagagacagagagagagagacagagagagagagtgagagagagagacagagacagagagacagagacagagttttttttgtttttttttttacttacaatagcttaacttaagttttttttttttttttttttttttttggatgtgtgggctggcaagttagctcagcaagtaaaagggcttgtccccaaacacctgacaacttgagttcaatccctgggacccatatggtggaaggagaggactgattcctgaaagccgtcctctgacatcacactgtggcataggtgtccacatcacacaaagtaaacaaacaaataaatgggaaaacaagtaagattttttttaacttcatgtgctcagaggaacctctactccagggttggaattctgagctttctctgttttgttttggttttttattttatttatttggtttttcgagacagtgattctctgtatagccctggctgtcctggaacttactttgtagaccaggctggcctcgaactcagaaatccgcctgcctctgcctcccaagtgctgggattaaaagcgtgcgccaccaccacctggtgctttctctgtgaagcaggtctattgctactgcagcctgcatcttgtgaccaccaaggagactccagtgtagcatgtggctaagctgtgatattcaaggggtcagcatgttactgtgtggcttatgatgggatgtctggcatgaaggggcacctgcacacatgagctctttttacacagacatcttgttctctctgcatcttgccttccttctatatacacttggctctctgggtaatagtactgaggggttaggttagctcaaggtttaagtgaagaaaaaaggtgactggccatatgacggaacaacttgccaggctgattcttttccttctggagtatattaaaaactctccatatatctctttttaaaataagttgttatttagtatatgtgcatgtgggcagatgcacacccggatacaaagtatagaggacagaagaggatgtgggtgtcctgtattcccattgttccttttattctcttgagacagggtctttcactaaatttggggctaggctggtagccagcaaattccagtcatcctcctgtctccatgcacacccataccactggggttacaggcttgtgtgtggccacatctggctttttgcacaggtgctgaggattggaactcaggtcctcaggcttgcacagcaacttttcctacccactaagccagctcccctgacccgtatacattccttgtttcatgcatttgccatttggttgtcttttactgctgtgtcggctcattggtggttgcgtctttgaaagccgtgggtaaaagtacactagtattaatatgttgctggatttactaattgtttatggtaattttgtgtgggttttttttttttttttgagttttctctggatcctggcatttgcaagtagaggcagctctgccgcttccctaacttttatcatctttttcttttctaattgcatcggctggcgtctcaagcactgtggcgatggcctgttcctaactttgattgcaatgcattgtttacctatcaggcatgggtgagaaagatagatatgtacctcaacattttatcgttgacgtttcaagcacactgcaatgtctggaggattttatagtgagcaccatctaaattctaccttatacaattttccatacttgtcagtgccagtgtcaatgtgtttgaagacgggcagagttttttttcaaaaattattattaatttatttattttacttgcatgagtgtgtgtgtgtgtgtgtgtgtgtgtgtgtgtgtgtgtgtgactgtatgcataaggacatactgtgtcagaggacagctgtggaaacccgttctctcctttactccgtgggtgaaccttcatctgtgtcatctcatcttcccagaggtagggtcttaaagacagtttccttagggacatttcctgtggttgacccagtcctggcatgtgctaagtcatcaggcttcactcaaatatgtgggtaccaagtgaggctgtggggagcttagtgcttcactctgggaatgggaggtatgttgtgtcagaagtagagcctgggcttcagacaagatggcgtgaaataataatattcaggggacaggggatgagggaaccttccccctctctgaagtattctgagcttctgcacagctggggctaggagacttggggagtgggcatggaacattccagaaactcagccctctctgcctgggcagctggtgggaacttcctgtcttcacttgcttcccttcccctgtgactccccagctgattctcttggcaaaatcccaaagacaaggaagtggcctgagggtcttccagcctctcttagtgaacttgccatgacttgtgtgtgtgtgtgtgtgtgtgtgtgtgtgtgtgtgtgtgtgtgtgtgagtgtgcagnnnnnnnnnnnnnnnnnnnnnnnnnnnnnnnnnnnnnnnnnnnnnnnnnnnnnnnnnnnnnnnnnnnnnnnnnnnnnnnnnnnnnnnnnnnnnnnnnnnnnnnnnnnnnnnnnnnnnnnnnnnnnnnnnnnnnnnnnnnnnnnnnnnnnnnnnnnnnnnnnnnnnnnnnnnnnnnnnnnnnnnnnnnnnnnnnnnnnnnnnnnnnnnnnnnnnnnnnnnnnnnnnnnnnnnnnnnnnnnnnnnnnnnnnnnnnnnnaaaacccagagacagacacacacgtgcacacacacacacacacacacacacacacacacgcagatacatagagagggtgattggtaggtaagtgagtatgtaggtggatgagtggatggatggataagaacacacacaggttttactcaggatggggtgtagtgatcttactaccagaaactacaacacggctgtggttatggctgaattgttggctctcaactcttgctccccagagggaaacgatagccttctcggctgagaagaacactgcccttgttggatgagtcttggctccctgtcctcaacctagcccacctaaacacttgtgtggctatttccacccaccacatttggtatttttatgttgttgcggggggatttgaactcagtccccagtgcttgcacaataaacattttatccacagtcacctcccccagcactgtactttaataacttttctgagtaattttactcagggtaattgcagtagtgtatgcagtggtccagggccacccattactttgaagttcctaagtcttctagttcaagcccctcgtggctccacctcttgcctctcctgctcttggcttcaggtcagaggctgagctctcctgggcttccccatttctacgtccttccttgcccattctgggtcagcttgctgcttcccactatgtcccctccatgttagagctcagcctacctccaccctggtcctgctatgatcaactccactgagccaatgatgctagttctttgaggctgctgctacaccaggccatccatccttccacctccaatggccaggatgggctgggatcccaggcagggttattgaaaggagacctttagtggctgagggtgctaaggactattgacctcatctgcatctgagtctgcgtgtctgtgagtctgtgagtctgtgacagggctttagacttcagatcctggatcagtgagatcagcaagctttgtgaacagggccgggtttcttgcagaccccacccacccacagccactccctctgggccaacagcctctttggagggcagcacttggaatctagaagccaggtttgtactgcgattgcctctctgctccctctcagccttattgtgccttgtctgtggcatgtgtacagaagacagctggtaaaatggtgtaggagctagttctgggctgcgcaaaataagctgcaagaacccagggtgacagagcagtaaatagcttgtgtggccataaaggacattggtggtgagtcttagtctagtcatttcctagccagttagaacataaaatcttagctttccgtgtgcgttcaggcaggctggctggccattagattccagggatccacctgtctgcacctccccagagctggaattacagataggcactgcttggcttgccatgtgccttctacggggatcgaacttgggtcactatgcttgggaagcaagcactttactgactgagccttctctctaatcctgtctctcttctgcctgtttgaaactggggcttactatgtagccctgcctgacctcaagcttgctcagactctgcctctgcctccagaatgccaggattacagacatgagccaccatgtgtggctagtttgtcttcttatttacaaaccagaagccaataaatcctacctcccaggggtttgggggtgatcaccatgcacccgttgaggattctcatgggtccaggggctgttggaatctggttagttctcaccagatagtcaccacaaccctattttacaggtgagaaaactgaggcacagcgaacttgcttggaccgctgaccctaagtcacccactcagaaagtgagaaggccagaatagagcaggtgatttgagccagctagctagcatagtacctgacactcagtgagcccccatttgagagctggcctgcaccatctgtcactccaaacgtccatctgcagacacaggcctgccagtggggagaggccagggaagtccaagagagcagagaaccttctggaccttggcaagccaggcaagagacaaacaagaatgaaaacatctgctatgactatttccaaccgtagccactgcgggaagaggggaagggttatgaggtgagtgggtcagggaggcttccagaagcttgccacacaaaggtgccagtcatgcagcagtatgagaatgtcttggcaagagagacaggcccatagaggcggagccccaaagggggagcatgcgcagtacgtacgtaaggcaggcagcggctaagagatccgctaagcctttgaattttcttctgtgagccataagaagccactcgagactttcaagttcaagttggcatcttacttgagctaagcggggaaaacaatatgataatccgactctcggattttgagtaggacagttagttcctccgtggaccctcaactgaggtgaagtagctcaaggcctttgtctctcgggtcatagctgcatggggttttgctgttgctgtgactgggtctccggtagtccatgctggctttgaatccctatacagccaaggattacctggaacttctgatcctctcgcctctacctccgtagagtgggaatgggcatacactacaccaccacatccattctacttggatctcggagttaagcccagggcttcgtgaatgctaggcctgtacgcttgccaactaagctacaccgcacgaaccttaacctttaaacttacgggggcctctttgcttccctgcagatgcaggcttcctagtgggaggcacctgtgcccactctggcccgggcagatcagaaaataggtatcgggcaggagtgtggtagatagcctgagaaggagaggtgtcgagccactcttctctctgagagaaatgcgtactttacgtaaactcagacggggccacaccagggaaccatcaaggtgaatccattcctgtgactgtcctgaccctggaccccagtttcctgaagagcagtctgtgagggctgcctctgcgttagctgtgacgtgtgcctctgggcttgaaaaagaaagaaatttgaatttactggagagagatcaccccaagagcaagtttggacttaacagagaaacccctgacagtttccaggtaatgacaattctttttttttttttaagagccaccaagatggctcagcagggaaagaagcctgcaccaagcctgacaacctgcattcaattagtgagactcacacggtagaaggaaaaacctactcctgaaagttgtcttttgagcacctgtcttggaaagggctgggctgcagcctgtctgcaacttagagcagtgcagccatccccctctgctggtgaaattggggtagcacaggctccttgttgcaatggtgacctcccctgagtgtgtgccctctgtcaatcaggggactgccctgcccctcctgtgaccaggtgctacagactgtcagttctgctagcacccacctgggaagtaataagagcacttaagaggcagaggcaggaggatctcatgttcaaggccagcctgggagagaggggctaggaagatagcgtgggaggtaaagagcttgctgtactactatgaggacccgagtttgctacctcggcatctgtgtaagactagaggtgaaagcgtggtctgtaatgctagtacccctacagcaggcaggagaatccctggaagcctgcaggtgggctagcctcgatttcacactgaagaacaagaaggggctggagagatgccttggtggttaaaatggagagatagcccagcggttaagaatatgtgctgcttttgcaaagcaactgcgtttggttcccaacacttgcaaccactatgtctccaacttcagggcatctgacacacttttctggcctccacaggcacccgagtaaaaaataaatcttatagcaaacaaaaaggcactgggtgttgtggcacatgctctccaagcaagtgcgtctctgcgagcgccgagacgagcgccaagacgtcctgtggtggtttgaatgagatagccagagcaagtcttgagcatttaaattatttgatctccagttggtggctgtctggggaggcttaggagacatgggcttgctagaggaagtatgccgctgaggacaggctttgaggctttgaaagactctcggcttttgccacttccagttctctctgcctcctgctttgaggagacagtgagctctcagctgtccctggtgccatgccttggctccaccatcatgaatgctaaccttctaaagctgaaagcccatgtaagttgctctcttttataagttgccttggtcatagtggttttcccacagcaatagaaaccaatatacatagcaagaccttgtctaaaacaacaaacaaaaggggagtccctgcctcaaacaacatggaaggtggagacctccaacctccacacacgcactgtggcacgcatacaccgcctctcaagctcgcgcctcccattgtgcctgccttagcagcagggcagagagcttaaagaataggtcccggtgctagggtttctggcatcagctgactagagtcctttttacaaggttaggcatggaggcgaacctgcccctcccattcgatctagtctgccccaggctgaaatgctgtattgctcttagctctctgagccgtgctgtaattgggaaatagagcagaagataatgtggagaaggcaggcatcctggcaggacgctgctggtctagcagggcctgaggaatgtgtatccctccccccctgcagcatcttccgaatccttcttctgtcactgtttctagattctatcagccagtcttggacctctgtgcccttcacccttccatggggaggccactagacctccatcacttccacgagctccttcccgacagagcagagtttccagggatctggaaggacctggggacttggaggaagtgaagtcccaggttctagtcttagctccaccatttccttacaatgtgaccttgagcagatcccctcaccctttggagcctcagttcttctatccctaaagttagggagatgacacctccctcaaggggatgattagaccaaataaggtgtgtaagcttgtttgcaaaccttacatgcaagatggctggtggggtaatgaagttatgttctccaagcaccttgactttgaactctgcctctctcctgtgaccttgggcaagtcctgtgtgaaacagcaaaagggaggggggtagaaagaaggctcaggacttcacagtgctttccagcacatcagacggctcacggttgcctgtgactccagctctccaacttcaaggcatcagatgccttcttttgacttctatgggtaccttcattcacaacacacaccaaaaaaagtgcatatatatatatatccctaacacatattagatgctctgtgaataccatctggtatggcatatcccagaagacagagctttctccattatgctccctgaacacctactatgtgcagggcaccatggaaagtgctactgatcctgtagtgaccagaaataaaggagggaaagaaagaaagaaagaaagaaagaaagaaagaaagaaagaaagaaagaaagaaagaaaggaagagctcagctttcccagagcctacatttgaataggagaagcagataataaagtaaggcactcacagggcccaggagaagggaaataaggccaggaagagaaatccatcagggacaaggacagatgtgagaggggattaagcctttgaatagggccaagggaacctgactggctccgtttgaattcaatatccatcctgatctagtcagctgtgtgtttgtgtgagagggggagtcaggagatcgagaaatacgagtggctcagcttcagttagatgctcattctgatcctgtgtgtgtgtgtgtgtgtgagagagagagagagagagagagagagagagaatgctgagtgtgtcccagacttacaagctgaacatagttgtcatgtacatgcagtcttggcatctagagttggggagcagagctaaagctgaacccgtccctcccccacctccttctctccctctgctccctttccacaatcaccttcagtcctcaggacactggctaaaggcaattctgaggtaggagggtaagggctccagtacccaggatagccaccatccacgctccagtctgcctcccttctagctgactctgctgttcctggctattccacacccatcagaggcaggcaggactggaatctaacaccccaaagcctgtggctgcctctgaatgggtcagtacatatgaaccctggagatgggtttcaaatgctcttgcctgagacccacaggcagtaggcatgtggtggccacagatgttttatgcctctgtgcctgcaggaccatgaccttgacaggcctctggtcttaatcatagcatcctctctccctggactgatgttgctcaccttagacactgcgcccctcaccatcaggggtctctcaaggtgccctataccctgtgagcctgaacagaggtcagacctcagaagtctccccactctcagccattctacagatactgcagaggcagttcaggaaggaacaaaggccctggggcttccaggaaacctgccgtggccagtcctgggatctggtctcagcaggcctggagagacaaagcttgtctggagaatggagacatacctcagttggtagagtacttgcttcacagatccatacccagcaccacacaaactgggtgggtgatacacgcctgtagtagaacccccaaggtggccacaggagcatggggcaggggttaaggcagctgaagagtgaaaatgtcctgtaaatcatgaagtgcaagattcccgaccccatatatcataaaggtgggtgtgtattccacgaaagacgctggacgtagtgtgtggtgaaagtctcaatgacagacagaaggcctgtcccactcggggaccatgtcgactgtttaggagccaaccagccggagtgctgaagaggcacttagtgagggcttgctgccaagtctgaagaccggggttcaagccctggaaccagtttggtgggaggagaaaactgattcctgaaagttgtcttctgatgtcacatgtgcacactatgctcactaaataaaatgtttataagataaaataatatgcatgcatgtatatacatgtatatatgagtatgtaagtataggtacacacatacatacatacatacatacatacatacatacatacatacatgcatgcatacagttgagtggcatcacccacagtgcagggccctcccacttcaatctctaattaagaaaatgccccacaggccagtctggtggaggcagaaggccctgggtgatgattttacccaggctggtggccctttctttaaaccaccttcactttttgactctgagaccaaaaagcaaaagctcaggcatcgatacccagccatggagccacaggggtgagatgaaaacccgggttcttgtcacttgctgttgttgtccagactgtgactgtggcttggtagtggtcctgagtgtcacgtgggccagccagtgactatgctagaggaactgagcagggtgtatgtgacaggaagcgcttccggccggccaccagctcctctcctctcccttgcctggctctgttgagtagtggaaggaaagatctatgggtgggcagtaacacagaagggctggcaggcccttggagatgtccctgtaccacagatgcgaggcctcactcacgaggtggctctctggttcaactgcctggggtcatccatctctgtctaggcttttcccaatggaaggctccctctggagcaagcatggtgtctagggaaaaacccagaatgtccgaggtcctagcttgctcatcctgcattcttatataccccaggaccacctgcccaagggtggcactacccacagtgcaggaccctccacagcaatctctaagaaaatgccctacaggccagtctggtggagactttttctcagatctctctcttcccagatgtcagcctgtttggggcaagaaattaaaagcccctgaagtccctagagctcactccacagtggtctgggctgcgtctccagcatcccatgtcttcctgttgagcctagttctgtggctggtgctgacagcacagtgctgggcccatgtttccttctctttctctggcctgaaccagaaacttcctttctcctcactgcaaaccttgtgatatgtaggtttccccaccaggcctatgagcttccaggcgtttgcaatcacttttaaaaattatttatctaatgtatatgaatacattgtagctgtcttcagacacaccagaagagaccatctgatcccattacagatggttgtgagccaccatgtggttgctgggaattgaactcaggacctctggaagagcagtcagttctcttaaccactgagccatctctccaggccttgtaaccacttctttttttttttttttttccctcgagacagggtttctctgtgtagtcctggctgtcctggaactcactttgtagaccaggctggccttgaactcagaaatccacctgcctctgcctcctgagtgctgggattaaaggcgtgcgccaccatgcccagcttgtagccacttcttaaacattccccatagccacagtgttccgtgggccaccatctgccccgtgtagagagtcagtgctggggttagacgtgggaaacttgccctcctccactgtcttcccacccactacacataaggccacgagtgccagaaaagagtggttccatcagctcgaggcatgaggctcttcatgtacagcttattccccagagaccaagtcccaggcagggtctagtaccggtgccgtctgctcactggtgttatatgacctcgaacaaggtggtcggttgctggccctgagcctcgggtttctctcatctgttgcatggggaggaggtgtctccctgtcctgctggagaacaggtgaccgaggacccccttcctggaggctaacacaacgctgccaggagggcagagataaaaaagacctggagatggctcttcagttgagctggcttggtgacatcaaacacacctcagagttttcccgggccttaatttcccccgggagaaaaagggacttgggaagatgtgtgggaaagttgtcggtgatatcgttgcagagctcagctaccccccgcccccatgccaagggatttcagccctgggaagggatctgccctttacaagccatgggagccttggatggctccatgcagggggaatgcacccagaagcatgctgtaaagttaccagtattcttggggagcccaggagtttaaaggagggcaggaccctaggagcaggccttcaagacaccgatagctttgcatcctgggccactgaggctctctctgacatccagctctgttggggctccctcctccatctttttagctagccatttccaagctgttgttctgcaggagtggacagatagggtagcacagggcttcatgaaaagggccagtaaccagcacatagcacagacagtgtgtgctctgaggtttgcagcagcaggaatccttgggccccagggagccagcagcctcctccccacccatactcctgctactaagtcttgggaagcctcttgtccattttgaggaccctcaatttgaccaaggacagaggtgaccccagtacctctccttcctggagccaggagaagtgagtgtgttcttcagagctgaatcagctggggaggggctgtaactggcaccttggatgaaggtcccctgggtgcaggaacatgagatgccttcccactccagagtggtgcttaatgatctcaacctgttggaactcttcctggctctgtcactgtcaggtggtccagtttccagacttatcaagtcaccttctctaggtgacgatattcatggagataggattgtggaggtgttgagggatgaacaacctaaattcgggtaaagactccagagagcacaggctggaggcaagggcacctgacctctagagtaggctttagggagatggaaaacagccccaggtgataacgacctcattaatactagtttcttagggttttattaccgtgaagtgacaccatgaccaagacaactcttataaaggcaaacatttaattgggactggcttatacttccattgtccattgtcatcgtggtgggaaacacggcatcctgcaggcatggtgctggaggagccataagttctacatcttaatctaaaggcagccaggaggaaactgtcttctgcaggtagccaggaggaggctctggatcacactggccagacttgagcatatatatatatatatttgagacctcaaagccccacctccacagtgatgcagttcctctaacaaggctacacctcctccaatttggccacatctcctaatagcgccacctcccatgggccaagcatattctaaccacgacaactagcttccctccagaagagagctgagtatacaaacagtccatccaatgccttgggactaggacagcacacagaagagggaggtgttggaaaaggcagtgcctacagatgtctctcaaattgaggcttaggattcacaggggacaacccttctgtggcccatcaccaacatcagtttggtcttcctatgtgtggtattgaatttcaggtaggctaatgttttatcttgttttgggattgcacaccctcaccccttaccctatccatgccccacccccacctcctcatggataaggccgactgtggcactgaccctgtaggaaagtctcagatgccttcctgaatggggagtccaggccccaagggaacacagagtagtggtttccaaacatggtatcccaagggaataatggaaatctttcaaaaacacaggagttcagccccctcttagatatagtagttgcattgtcaagctctataggtaggtatgggggttctggaaacttcccaggggatgctaaaatggagcaggtgcaagctgcagctcctgcctcccatatgcctcccccaagacaactgcctttctagggttcagttttctcatccataaaccaggttgtggggctggggagctggctcagcagttaaagccctttttgtgcaaggcccatgaccttgagctgaattcaatctctgagacccacatcaaggctgaagaagagaaccagccattgccctttgacctccatacatgcatatcatatatacacactaataccactaataacaacaataataaattaaacggggggggggctagcaaagtggttcagcgggtaaaggcacttgccaccaagcctaatgacctaaattccatccccaggatcaatacagtgaaggcagacaactgacttctcccacgagttatcctctgacccccacatgtgtagcatgagacaggaacaagcacccccccacacacaattaattagctaattaattaattaattaaagcaggccctcagaggagggttggaaggcctttatggggttattacaaagactacatagaataatgtctataaatcattttgtccagatcctcgtcatcttttgcctcccattgcctttccgacatcagacttggaaatgcctgagttccgtcccatgacactggaaggagacacttgggttttcagtgtaccctgctccatggggtggcaaggcagtctggcaagcccaaagagagggctgtgtacaaggtcacctagacaataaaggtctgcatgaaactcccatgtcccctgctcagtgagggactttgcccagatgagctgactctcctggtaggaaggcatttgcttctttggataaaattcagctctgcagaatagaaagttccaggaaatcagggccaaggtgcaggatgtttggaaagaacttaactcctgcctcgcttcacccatgtccattcactggcctcagaggaatacaggacagagcccagggcacccaccatactccctgcagcttgtgggatgactgcaccccagagtcactggatttgagaactttccagagcctgactgtgactgccagtacatgctacacccatatccatgcccatacacaggcacacacatacatggatacatacgtggacaacccaggcgcatacatggacacacacacatcactttcagtcagttacacaattttactcaattcacagggtctttgtttcttccagtgaactcaaagggagcaaatacatcaatgttccaaaaacatggaaattggggtgataccagtctctaccccacttccttaggacctgtttgcattgaaccaaactttctttttcttccttcctccttcccttcttcctccccgccttccttacacagggtctcatgtagcccaggctagcctcaagctccttacgtagctgaggatgtctttgagcttgtggtcttcctgctgccacctcctgagtgctgggattacagattgctgctggctcatgtgacgctagggcgggacacaggccaggatgagttctttatgcatttgaagcttctgttgagccacacagacccagccggggcacgcactcctgtgactacgagtctagaggtggccctgagctgagtgagcagggcttttataaaggtaaaaaccacagccacggtacatcctgctgacatagctgtgatagctgttagcattcaagacaagatatgaactttgaataagaacagggcacaattggcatttctgtttgatgggagagcagaaacccttgtggttacagaaacagaacaatgaaagttcctataaatacttcacatgcctggggggcaggctggcctcagtttcagcccaaggtcatgtcaggattaaacaagggttattctctctttactgcatcccagcccttaggtagtgtctgtttcttcttttaaaatgtgtgtggatattttgcctgcatgtgtgcctgggcaccatctgcgtgtctgatacccattgaggccataagaggccatctgatcacctggaactggagttacgaaccattgtgagctaccacgtggatgctgggaatcaaacatggctcctgtgcagtaaccactgagccatccgtctcgtcagccctagacgttcacttgttagcatacgtgctgccgaagcgagcacatggtgttcactatttaataacaatacccatagggctctggggtgtagctcagcttatttggcacacaccaagtcctgggttcaatccccagcatcacacacacaaagaaatgttttcaattggaggggaaaaatgtctatcttttaaattagaatgttaaatattggggtcaagagagtagctcacctcaacaggatagcacttgcctagcacatccatatacttgattctaacaccaaaaccaaaacaccatttttttatattaattttaaggtaagggctagagagatggctcgtggctacaagagcctacggctcttcctgtccctacccagttcagttcccagagcacagctggggctcccagtctattattcctgctccaagggagccaagaccttcttgtggcctttgcaagtaagtacacgtacatggtcgactcgcacacagcacacacagacgcataaataaaagtaaatcctttttaaaagtttcgaaattaactaaatgtttaccattgtctcagtcagggttcctgctgctgcagggaaatgccatgaccaaacagcttgaggaggaaagagtctatatgcttctctcacagttccgtgtaacagttcaccttcaaaagcagtgagggcaggagctcaagcaggacaggaacctggggggcaggagctgatgcgcaggccacggaggggtgctgcttactggcttcagttcctcgtggcttgcttacatagcctgctttcttataaaacccaagaccaccagcccagagttgaccccgcccacatcagtcactaattaagaaaatgtcctacaggcttgcctacagccctttatggaggcattttctcagttgaggttccctcttctctgatggctctggcttgtgccaagttgacaaaacaacaacaacaacaacaacacccaaaccctaaccagcacaagtcactactaatactcaactggttaggaatactcacggtggacattatggcatactttcttacagatagtgtggtttctagtaatgacaatctctggtgtatagaccacagtttagcagtcctcatactgataaatgttcctcagatctgatgctatgaaattggcatgctgtgatccctctatgcagggctcttgcagggggaagataattcagcaacgatatcttggcttgcctttcagtggatcaccctggagtaaattcccaacgtggaactgttcaccaaagggccgtaaacctgttaaatgtccggtgagggagaaagggacacagttcagtagtagaacactgtctctgcaggcacagagccctaggaccacagaagcagggcagggtggcgcatgcctggaagcccagaattctggaggtgcaggtaggaagatcacttcatggttagctacaaatgaatttgagtctgacctgttaggctacaatgaggctctgtctgtaaaataaaatacagggccggtaagatggctcaatgtgtaaaggcacttacctccaaacctggtgacctgggtttaaccccaggacccacatgatggagggagagaactggctcctgcaagttttcccctgacctccacagggacactatggcatgcttaccctcatacgtgtacatgtatgcccttcctcacgcactaaataaatcaataaaagtactctttaaaagatttatttgtttgttttatatatatgagtgctcttttttcacgcacaccagaagaggaaactagattacagatggttgtgagccaccatgtggttgctgggaattgaactcaggatctctagaatagcagccagtgttcttaatctctgaacatctcttcaattcttagggttttttgttttttgttttttgttttttaattaaatagaagtactggaatgatcttgccgggtgggcctctaggaaagcgattcccccaggtagaatggattcccatgcaaccgagtctttgggtccctgcctggctctgtggaagctgaagccctgggaggctcagggaccagatggtgtcttacatttcaaactccaaggaacccaccagagggactttcctgtgcactgaccatctatcagagctgttcaaccttttgacactacaatataacattgtatctataaatatgttgggatgtattcacagctctcctgggatgcttgcagccacaagaaatacaatcctgcaagtcactctgatatgtcacactggaaaaccctgaccacactcaggagcaatccaaacttgttgtcttggctgtaaaatggaattgtcctgagatttaaatctgatcatagttggtaagatatattaataatagcagtctgcactagagtttgcaacagtattggtgagggacttgtattaagtatgagaagggagtattggacaacagccaggagccactttgaagacagacaggtgaggggttgctctgttcttaggccccagtgagagtgtgggttggccactttttcctgtgagtgtgtgtgtgtgtgtgtgtgtgtgtgtgtgtgtgtgtgtgtgtgtgtgtgtgtgtgtgtgtgtgtatgtgtctgtgtttgtgtgcatgtgtctgtgtgtctatgtgtatacaggtgtgtatgtgcacacacatgatgtgtgtgggttgagaccagaagtcagtacagaatgtctttcttaaccactgtacacattaggtttttgagaggtctttcacgaaccaagagcttgccaattcagctagactagctggctatgggaccccagggatctgcctgtctctgtactttcaaggttatgaatgagtgccactatccctgacttttactgggggtcacagacccaagcgcaggtcctccagtctgaaagtagagttaagccatctttccaggctcagatttgattatattaatatatatgaatagtatctgtccaccctggtgtcagatgagaattattgggggaaaggctagcattaagtattagaagaaggaatcagatacaacctgctgccaggcctgaaaacagacagaggagggtctactctgtattcataggccctgtgggaattgaactagctattgtatttgtttgtttgcttattcattatttatttatgaagctgagtctgtctgtatagccctaggcttgcctcaaacttagatgctcccgtctctgccttccagatgatatatattataattatatacaattatatatataatatatatttgtataattttagtcagggcatctgacttgttatttcatctttatgtcaaagtggcaaatgagcaaaagtcttagtaatactaggagtggtgtgttggtggtggtgtgtcctgtctacaagagcccacggctaagtttctaggaaatttttaaagccgattgttaagtacagcctttattaaaaattaaattgcattaacttacaattaaataaattataataaaagctgaggtacagagtattaaaaattcattgcatcttaactgtttcaccatgtatacaagattatttgtgtctattacatttgcccaactgtgtcctactaagagtctctttggggttgggcatggagccctgttggtagagtgtttagcctagcatgcactaggccatagggagaggtataaaccttcgcagatagcacatgcttgtaatcctagcacttccgagctggaatcaagaggagcagaaattcaaagttaaccataggtatcaagttcaatgccagcctgagccacgtgagagtctgtatttaagacaaacaagtcttaaaaaatggtaaagtggcccagcaggtaaaggtgcttgccacacaacagaagtccgatgacttaagaattcatatagaggtaaaattccacataattgtcctctgacctttacataactactgtgggatacacattcaaacataccacacacacacacaacatacctactgtgggatacacattcaaacataccacacacacattaaaaaaaataagtaggggctagagagatggctcagcagttaagagcactgactgctcttccaaaggtccccagttcaaatcccagcaaccacatggtggctcacaaccatccgtaacgagatctgatgccctcttctggtgtgtctgaagataactacagtgtacttacatataataaataaataaataaataaatcttaaaaaaaaaaaagtaaaatcttatttcatccccagagcatggcccctgtctctcttcactccacacagggtccgggatgtggctgaccgttccttccagggccagcccatcccccgtgggctcctagctcagtgttcctgagagccagcaattgaccagcctccgtgcctctcagagtggcctgggctgggctgggtgccagaaacttaatgcaaacagctttgctaagcaaatactcaagtgcagctttaagatgagctgggagtagtgctgggaggtgaggggggagggagagggagcgagagagctgcagactgccaagttccagcctgccaagttaaggggaactgggggaaaggcactggttaggaacaacaaggttcaaagggcttgcttggaagaatcacactaaaattctcagcctcacattcagctgtttggtttgggggccattaattagcctttctgggccttcatttcatcatgtcgaattcggtttgttatgagcactaatgataacgcctagcttcaggagatcctgggatcatatttggctcagcttaaaaatcacagtctagggctggggacataggttggctgatagagtgtctgcctggatcacacaaagcactgggtcctacccccatctagtaccaagtaaactggatgtggcggtgcacacctgcaaccccagcccttgggtggctattagaaagagctccaggacttctaggtcagctgggtccacaggttgacttaagagttgagagcttgccccagtaaagcactggctgctcttcaaagaacccaggttcaattcccaggacctatacggtggttcacaatggtctctaaccccattccagaggatctgaaacactcttctggctgctgagggcacacacgtggaacacagccatacctataaaaataaaaataagctagagcaaaagatgacattagatgattcattcaccgctgtaaaaaccgtttcctgtacaagcaggagagcctgagtttaatccccagaacccacagagaccacagtagcacattcttacaccacagtaatccaggaaatagctatcacagggtccctggagctggtggcctgccaatctggatcagctggtaagtcccatgtcagtgagagagcctgtgtctaaaaataagatggatggcctctaaggaagtccagaggttgaactctgacctccaacctaaacacacagacaccatgcacacaatcaaaaatatttcataattaccacaagagagcaccccaccccaatattataattctcaccctagagcaccttcaaggtatccccagtcacctgcgattctaaggaaagaaacattgcaagtgacagggttcaagcattgaatacattgacttactgagaactgtagctgacctgaaagcaccccctcccaccagtaagagagcttggtggagcctatgtgagtgagggtttaaggaacttaggctcaggaatggtggaagcatggcttcctaaccccgctctcctgttttgggtgatagccttgacacctttatcagagcctaagaatgtttaaggctgtggctccagcctcctgagaaaaaccaccagcttcctgagtcacagatgtcagaacagcctagggctttccatcaggacacagaaaggaagtaaagggcctgaggagcccaccccagcagatgagtccaagcaaagatctttcctttctgagccactctgaatggggacagcaacctaatgatttgtctctccctacagacaggcagaatcgagccaaactaccccaaggtatgcggtcatcagggcaacgtgctggacatcaaatggaaccccttcattgacaacatcatcgcctcttgctccgaggacacttcggtgagctgagcaatgggtgcttcccaggcataaccctgagcatgtacctccctgcttcccctagagagcctctatacacactacctctttctcctctcagccttgccccctccctccctctccaaccagtcccaaaatagagaggacaagacaagggtcgggaagggactgagggagaggatctctgctggacacaccccgtgcttccaagtttggaagtgttgctttgtaggtgagaattagaaccaaaaacttaggtgtgtgattcagcctctgcctgtgctctatggtgaaggaaaggaagatggggaggagaaaggaggaaggagaggaagcaaggggaggagggctcctgagcatttcaggctcacatggtaaatgtcccatcatttatcatctgggagctgcggcttcaaggactgtggtgacaagggtcactttggggatattgaatcccaactttccacgttctacccctcgtgggaagatgaagtaaataggagagagagcagaggcgagagcggatgggtggagagaagagggagctggagatgggagggaagagcagaaactggagatactgctcaacttggttaagggcttgctgagcaagcatgaggacccgagttcaatccccagagatgaaggtagaaaacgactggaaaatccagggacacagacatcagtgcagcttcctgtctatccttcctcagtgtagctgcctcagaggggcaatggaacagagtagaactcagccaagctgatacaagagctccctctattcccaagtgaaggagcctctgctctccagccaggccactggttacctagtgctcactggcgtagtcggaggacaggttatgagcccaggatactagaactggaaacaacttcagagctgtctccctgtgttccccagctggaccttgaactccagaaggaagagagcatggcccatttggctctgagtccctggcatctaacacaagacctcatatctaaaacaaacaaacaaacaaacaaacaaaccctcttgctgtgaactgaatgaaaaactcgagttagatatgtgcacagaccgaagaatacacacatggatggatggttagatgtctggatgcatgactgatagagagatggttgaatggctggatataaagttggatgattagatagatgatagatgatagatagatagatagatagatagatagatagatagatagataatgaataattacgatggaaaaggagaaacagacagtaacatctccatgaattcccaagtggagagtgagatcagatcgcaggctcagaacttacataacaaagagatggagggtgcactggaaaagcagacagggcttggctggctagaaagattcctgagggcagaaaatgtctgtggggacagtgaatggaagtggggaaggaactctattggctttgttactttcttcagcagcttcaggacccaagtgaccacaggacagctatcaggggccaggtcacaggaagactagagctgcagatgtgtggacaggaggtggatccaggaaaggccacagagcccaaggaatcactggctgctccccaggctgggaaggaggcagatggagctcctggtgcctggtaaacatgatggtcaactggagaaaggctcagggctcagcaggctcagggcaggcaaggctgctccccacctagggagcccaggaggacaaggactgcatctgtctctgtcccagcctactggaagggctgagtgactcaccagccagcagtgagcagacagtcttgagattctgggctcttgtatgcactctggcctcaggactccacatgcactctccccctgggagacaggcagcacacgaagggacagcgtaagacccagctgggaaagggaaagacaatcaggaggaccggcctgtgttagctcagcctcttcctccatctgctgttgctccctactcctggatgtagccaatgcacaagacatgcatggtgtgtggtcagacaaactcaaggctcagccctgctacaggagtcacatgatcggtacccactggtggacagcctgatgggatgctggggtccaaagtctctactgtggaatctggtggccttgagatgagacgtcggtgccgctgcttagctgggtgcccaatggcatatggcttcgcctctccggaccctggctctgctcatctcagaggcagtaatagcagggccctcctcagcatagtgaccaggatatgaagaagcccatgcataccgctgtgcctggcacctcacaggtgcttgctgcttcagtcctgctctgcagacagcctcagcagggaggcagagcccacagacacatacagatgagtcaggactccacaaaggctgtgggcacagacaagagggaggagctaatgaagacccagatacagaggagggaacgtgggagggctggtcctggaagactgggagtttgttcactagggcgagagcctgggccacccatcctcaattaaacaattaaacagacaaggtaatagtgaaacacagagaaaggagacttctttggtaaattatttattcagatagcattcctggtgagctatggtcctgtccatcactggcccatcaatgctggcttccagtctcttcttcaaggtgaccaaacaagctgtggaaactgtatgaaacctttccttgagataagctccccggggctggagagatggctcagcccttagttaaaggctgggctcacaaccaaaaatagaagagataagctccccacccccacccactcacggctggcgctaggtttcagactcttgcttctcccaacatgagattcctatggggattccaatttgttaggagccattttcttaacagtctaataaccagaaagagggcacaagtttctttaggatagcttcattcctgtcagtacggttacacttcaaccagaagagaaagggttaaagtgaacccaagaagagtcctggcctagaacaaggcctggagggagtaagcagggtgcctaagaaaaggcgagtcctccagcttggttggagctgtgggtgatgtcaccggggagtaagcaggagagagggttgcagagggaggttgggacagataaaggaggaaaggcagggtgagcttaactctgccgccggagcttctcaaaccatccaaggatcctttgggatccaggggatgggggtgggggtctgaaggggcctcagccagcttttggggggacataaggctccggtcacctggatggaggctgctgatgtagacaggtgattaagtatgagataggggaggacctaagcttttcagcagctgccaggcctgctagaagccaggctcagagcctccttagcccgctggtttctgctcacacctgtgcagtacttaggacnnnnnnnnnnnnnnnnnnnnccccattccagcctgaagggtcaactcactgtgcagcatacatacagaggccggtctaggaggttcacaggtataccagacacagtgtttcctaccagggctaggaacatcatcccccaagaagcctttgctggtcttggtcctttcctgcaggaggccatgcaggaggaccgacagatggccttagaactcatggagtgcagcccacggcttaccacagccacatgggtgagcctcagtgtgtcacagcccgagggccacgtgtcctgaggacttcatgctgttatggggctctgctctgcctgctgccctcatatccctcttcatctaggaattgtatgaaacctctaaggaggcgtccaggccctccctgggcagtatctctggcattcgcagtcctgatgcttgacttctttcaggcactgctgctggagcagattgtaattctgtcaccaccctagagaagaactcagagatgtagattgtcagcgatgtcttccacccttagaaaacatttggaaaagtaaggttgttagtgaagctaggttgagatgtttttactactggctctgatgtaaaaaaagaaatcttagggaacagcttgaagttcagaaaggcatgttcttattagttgagctagggaccttttatgatcaaggaacaagaacaatgacagcattggctgatatgactctcactgaggctggactgatgataattgatttcctatatccatttttgccctcagcttcctgatatgatttattaaaaatggctggtgagtagatatgtgttttgaggatttaagataggtctgagtgattcctatgtaaaagtttagatttgtgattcttttaagattcttacaagattacttttaaataataaaataattacttctttctttgaaaccgcaaattgctgcctgccagtaacagaaactggctgagaaaactcccttccttgtttgcattttgatcatctataacaagttgcttggttatgaatgtatgtggttttttttgagaataatttgctttctttacctgtattacataatgttatagcttataaaggtattgaaaaacgcattggtttttcataaccgttcactagaagaaaataaatgtaaccacattgtagttttatactgcttgaaagattttgctgggatatgtaagctatggaagaaagaataaagtagggtaaggtatgatgtggtgtcatttggtgtggtatagcatggtgtcgagcgcgcccccaactcgccagcaagaacgacgccacagcaggatccttctgcacacgtttattcagtcctatttcttctttctctatatatctcccctgtttatatctctcccttgtttatatctcccaataataacaatcctctctcgaataataatcctccttctaacccgggcctctcactcttatatactctcagttcccatccacgcacagcaggccacaccacctcaccaggcacgcagcttcagctaatcagggcagcaggggcaaatctccaccaaattggattcacctgtatcctggtacacctgcgcagcactcaagatgtttgtgtcttatatgaggaagtcaggtgcaagtcatatgacttagctacagtccctggcgcctttaggactgccgccacacccgctccccacagcatggcatggtatggtgtggtgtgttgtggtgnnnnnnnnnnnnnnnnnnnnaatggggggtgggggtggaaaaactgttccttctacccaccagttgtgtgaatttgtgtgtgtggaatatttggagtctgtttgctggaactctgctctatccattctatgtgtgaatgtgaatatgtctgaatgtaggtctgtatgcatgtatgtatgtgtatatgtatgtatgcatgtatatttgtgtgtatgaagttactggactctgccttttttgtttgtttgtttgttttttgtttttcgagacagggtttctctgtatagccctggctgtcctggaactcactttgtagaccagggtggcctcaaactcagaaatccacctgcctctgcctcccaagtgctgggattaaaggcgtgcgccaccactgcccggctagactctgccttttgtttcatccattttgtgtgtgtgtgtgtgtgtgtgtgtgtgtgtgtgtgtgtgtgctcacacgtgtgaattttctctttccttctctttctcactggcgcgaaggagttaaaagaattcatagtttttccactgaccacagagagtgccagcccaagtaaattaagctttgtttcctagtttaaaagtctgctgagcagcttctctaatcactggctgcctttggccgcagcccctgtaggtatctggatccaccccagtcagccgctctaagcactgacccccaatggctgcctgcctcgggttacccaccagagtcattgacacttcccattacttacctagaagtgctcatccctctctgcctccattgttctctggtccccaaacattcagaggatgctaaagggatacagggagactccagcagctcctccccatctcgccccagggaagtctttagcactgtcaagatgctatgtcccttgggatcaattcccttcctccaaggcaagagagtcttttgtagtctatcccctacatccctgcaggatccagggagcctgcccaagctctttccctagaggcctcatcctggggggaggaaagggaccataactctgcctggcatctggcagaatccagttctttccgccagcctgctgggtgatgtcacctattgttgaagtgctgtgctttttatagcttctgcagcagcaagggagggcagctggttggctggctggcaggcacagggaagggcagtatagctttctttatgagcctcaagctcctggcccttccttgggtggccctactcagaggaagatgatagagcatcacacaatagacagacagacagacagtgttcaagaaaaggagagtggattcccaggagaagaaaggtggcaggagggaggtccctctccctggtgggccaagctcagcatctttcttttattttctctttaagctccaccaccagcatctgctctctgcaacccaaagataacacccctcctggggatctcagtggtagagtgcttgcctggcagactcaagcccctgggctcaattcctattacaaggaagaaagggaggaagaaaaggaagaagggagaaagagagggagggaagaggggggtagggaaggaaggaaatacagcctgggtgcccattctgtgccaggcagcattgccctgttggggacacaggggagaatggcctgcactatggagctggctattggtaagtcatctctgcatcccgaaaagggtgagtgcagactggcatttccattacgactggacagagtagctggcaagcccacaggaaattgctatagacagatggctcagtagctaccagtacattttgactctgacgtcaacaggacgcctgtgctgcttttcctataaagaacagcacaaggcccagcatggtggcccacacctgtaatgccagcacttgggacgtaggagtatcaggatcagatatcaaaggccatccttggctgcgtatggagttggaggccggcttgaactacacgagaccttaaataaataaataaataaataaaggctggccctctgggatggaggagatggctctctgggtagcaactcttactgtgtgcgcatgagtacctgaatacaaatccctagaacccgcataaaaactatacacacacatatacacacgtacccacacacacaaaataaaatcaatattaaaaataaaagctcagcacatagtgacagtcggcccaggagacttgatagtgacaacgaaccacctcattcccggttcatgaacttgtgtatagttttgttattttattgtgggctcctacttctaaaaagtcaaagttaactgtgaaacagcttcaggcagcctttccggagagagccagaagaggcgctgtcgtcatgggaggccatggctatgtgcgttgctttcctgaagacctagacggttacagggaccaaagatgcagaagccagagtcagagctacccatgaccctgaccctgcaggtgtaggtgggcatcatgtcttagctttgataataaaattaagaagtgagcatagcagagcatactatgcctaatcttgacatttgaggaggaaaagggaaacagttcaaggtcatccttaggtacatagtgagttcaagggcagttgggtcaaaaaaaaatataatgaaagaaagaaaggaggggccagggagaggttcagtggctgagactgcttgctgctctcatatcctgattccatgtcaggtggctcacaatcatctgtaaccccagctccaggggatccagtaccttcttctggcctctataaacatcaatatgcacagacacatacatacacacagatacaataatacatacatacatgtatacatacatatataactaaaatataattttattctctcatatattataccctgactatagtttcccctccctcccttccccttaggctctccccaaccccaatataattattcttcaaaagaaaaaaaagagtcacatctaaagtttgacctattgaaaagttgtctgtaatccttaatgttatataagcattactcaagtaggtattgcagatccatggtcattgtcttagttggggtttctattgctgtgatgaaacaccattaccaaaagaaacttggggaagaaaggatttatttctattacatttccatatcacagtccaccatccaaggctgtcaggacaggaactcaaacaggtcgggaacctggaggcaggcgcggatgcagaggccatagaggagtgctgcttactggtttgctctccatggcttgctcagcctgctttcttatagaacccaggaccatcagcccagggatggcaccacctacagtgggctatgttctcccaacattgatcaagcatccatcaagaaaatgcaccatgggtcagtctgatggaggcatcttctcaactgtgattctctctttcaaaatgactctagctgtgtcaagctgacatacaactagccaacagtcatcttcctgggaggatacagattttattttctttagtcgtcgaggcaattgatttcattttctttagtcgtcgaggcaattgtgtggcaccggtagagtcacccctcagctgagaaaacatgttcagaaaaatctaaaaaccttggccacagattcacagtgactcaggtcagagcctgggtttgcagggagcttgcacaagctcaaggtcaatccttgttgtctagctgacctgtccccactcacgcacacgctggtttggaggctctatctcctccttaatgcgccaactttgccctcacttgtctgcgcatgtccgctgtctctcaggagactgagctcctggaagcnnnnnnnnnnnnnnnnnnnnnnnnnnnnnnnnnnnnnnnnnnnnnnnnnnnnnnnnnnnnnnnnnnnnnnnnnnnnnnnnnnnnnnnnnnnnnnnnnnnnnnnnnnnnnnnnnnnnnnnnnnnnnnnnnnnnnnnnnnnnnnnnnnnnnnnnnnnnnnnnnnnnnnnnnnnnnnnnnnnnnnnnnnnnnnnnnnnnnnnnnnnnnnnnnnnnnnnnnnnnnnnnnnnnnnnnnnnnnnnnnnnnnnnnnnnnnnnnnnnnnnnnnnnnnnnnnnnnnnnnnnnnnnnnnnnnnnnnnnnnnnnnnnnnnnnnnnnnnnnnnnnnnnnnnnnnnnnnnnnnnnnnnnnnnnnnnnnnnnnnnnnnnnnnnnnnnnnnnnnnnnnnnnnnnnnnnnnnnnnnnnnnnnnnnnnnnnnnnnnnnnnnnnnnnnnnnnnnnnnnnnnnnnnnnnnnnnnnnnnnnnnnnnnnnnnnnnnnnnnnnnnnnnnnnnnnnnnnnnnnnnnnnnnnnnnnnnnnnnnnnnnnnnnnnnnnnnnnnnnnnnnnnnnnnnnnnnnnnnnnnnnnnnnnnnnnnnnnnnnnnnnnnnnnnnnnnnnnnnnnnnnnnnnnnnnnnnnnnnnnnnnnnnnnnnnnnnnnnnnnnnnnnnnnnnnnnnnnnnnnnnnnnnnnnnnnnnnnnnnnnnnnnnnnnnnnnnnnnnnnnnnnnnnnnnnnnnnnnnnnnnnnnnnnnnnnnnnnnnnnnnnnnnnnnnnnnnnnnnnnnnnnnnnnnnnnnnnnnnnnnnnnnnnnnnnnnnnnnnnnnnnnnnnnnnnnnnnnnnnnnnnnnnnnnnnnnnnnnnnnnnnnnnnnnnnnnnnnnnnnnnnnnnnnnnnnnnnnnnnnnnnnnnnnnnnnnnnnnnnnnnnnnnnnnnnnnnnnnnnnnnnnnnnnnnnnnnnnnnnnnnnnnnnnnnnnnnnnnnnnnnnnnnnnnnnnnnnnnnnnnnnnnnnnnnnnnnnnnnnnnnnnnnnnnnnnnnnnnnnnnnnnnnnnnnnnnnnnnnnnnnnnnnnnnnnnnnnnnnnnnnnnnnnnnnnnnnnnnnnnnnnnnnnnnnnnnnnnnnnnnnnnnnnnnnnnnctatgaaacatgcataacagcagctttttggaacaaaagatgtgtgtgtgtgtgtgtgtgtgtgtgtgtgtgttgtacacatgtctaatctaagcattggtcttctcaattgggggtgaaaggaatgtgtgtcttcctggtcatcgccccactccactgttcccactgtttctaaactagtcctcactccacagtctttgcactgttgggtggcagaaggtcatgccaggtccctcttcctgtcactcttgcacactagcaggtagtggtgggtggtaggcgagagctaccaagggacttccagtgaggaaatttgttctcaagtgggctgattccctgaaatggagaatggtggtttcaagttctccatggaaaaacttccttcttatcgagttgatagacgagttatggaggcttttgtggggaggcccttgcttccataatccgggggaggtgcacctgattggtcaggaaacttggcaaaggagttctcttcaagcaccccaacttcagccttgcttgccttcagatgatctttgtgcattgatggtctagccaaatggtgagcgtgatgaattgacatcacatattaaattgttccactcttgttagccaattgttttctgtctagatgatgtcataaggaatatcccatgccttcctaggtatattagtgacatagttacttcttttgactaactatgagaaagcactaccaaggcaacttatatagaagagtttatttggttacagaggattcatgatggttacagagttcatcatggcagggatgcacggtggcagcagcagcagcggcgggagctgagggtttatgacctttagcataagcatgaccttaagcatgaagcagggcgtcaactggaagccctagctgggtgggggtggcgcacacctttaatcccagcatttggtaggcagaggcaggcagatctctgggtttgaggccagcctgctctacagagcaagttccagggcagccagggctacacagtgaaactctgtctcaaaaaagggggggagagagagagagagagagagagagagagagagagagagagagagagggagagagagagagagagagagagagagagagagagagagagagagagagagaaaatgaactactcaaagcccacctccaatggcttacttccttcagtaattaccttccttcaattcacctcctgaatttcccccaaacagcacactaccaactagggacaaagtgttcaaatacagagcctacaggggacattctcattcacaccgccatggcagatcacagagtgtcatacaagggccttgggaaatggctcagtggttagttacgtgtgcttacttctcttctagaggatccaagtttggttcctagcacccacgtcaactgctgtaagtctagctccaggtgatctagtgccatattccggcctccttgagcactgcactcaagtgcacacacttgtgtacacacacacacacacacacacacacacacacacacacacacgacctgggggcatcccacttttcatcataattctgtagctatatacagcccctcatagctgataagctgttatcaccgctatctcacgctgaatcccagtaggccaggcagggcaagagcagggacaacctcccccatgacacatatacacaccgccttgtagatgacatggcaacagttgagatgaatgcctgcatggagccactgaagcccagtgggatgagcatcagagaccatggtctgtctggggctcagtgcctctctctggagctccccacctggaccatttttggcccatctttctctccacagaccatccttttctgcttcttggctcacacaggactgcaaacagcagctccaccatccaggctctgcttaggctcgcccctcaagcctgacctcgagcctgatgctctgccctcgagcccgttatctcttagcctaaaccacagcttccctctgcccagatgtccatccagggtcaggacagagtaggagacccaccatgaagggcacagaggagctggggcagaaggaggagaagcagatttccttagcaggttgctggtgggaaacgaaggcagatttttaatttggtgcttgctaaaagctgctgtgactgtctgagcctggcaggggaatagcatgctggggaggtagggagaggctcagctgatagagtgcttgcctggcatgtgtgaaaccctgagttcagtccccagcaccctataaaacaggtcaaggtggcacattcctgtgatctaaacactccagaggtggaggcaaggtcagacggttcaggtcatctcgagctacatttgatcctcttcaaaaacaaaagagcaaaatcaacaaaacagaacaaaaacctggaaacaatgttcattgtctgcagttacatgctgtctagcactagctcctcccccaggtctgtggcacccctgcccctgtctgtccaactaaagacaaggctctccctctgcaggtgcggatctgggagatccctgacggtgggctgaagcggaacatgaccgaggcgctcctggagctccacggacacagccgccgtgtggggctggttgagtggcaccccacgaccaacaacattctcttcagcgctggctatgactacaaggtgcggtggggggagggggatggtccaggagtgggcagtctggctagagctggctcagtgggggatgcagggggaagggggagagcaggggatagtctaagcacattgactgacataggcccatttggtcagtcagtcattcagtcacttattcattctctacctatctccggggcacaaatttttcctgggagtcttgggggcttaaggcatctttcctgttctctctggagtttagtggactagaagaccacaacgcccataacctttgtctggtaacttcctaaccaagagactatcatgccttcctagtaggaaaaatgagcaacctgagatgcagggctgcaggggaaattgcagccccaaaccctatcgtgtcagccacctggaaccagtcagggggtgatgtctctccttatttcttgaagaaaccaactcaagactggggcctgtgggggactctcaatgcgtgtgctggttacttttcctgctgttgtgaccaaatacccaacaagaaacagcttaaggaagggtcatctcggctcataggtggaaggtagagtctgccaagatagcaggctcatgcggcagctggtcacactgcatctgccgtccgtggagaggtgctgcccacatttagggtgggtcttcccgcctcagttaacctagtctagacactccctcacagatccttccagaccattgtcttctaggtgattttagctcctgtctaggtgacggacccagtgtgtagttgagatgcatctgcctttctgtacggaacccttggcaatgcagacagctcctcccggggctgttggtgtggatgaaggacaggcacccaggaccacagcagccagtgactttatccactgcacatctaccttcacaggtcctcatctggaacctggacataggcgagccagtgaaaatgattgactgccacaccgacgtgatcctctgcatgtccttcaatacagacggcagcctgctcaccaccacatgcaaggacaagaagctgcgtgtgattgaaccccgctccggccgtgttctacaggtggagccatttgttttgttgaggggcaggaggtgctggagtctgtggaggaatggggctgtgctggggccctgttcctgcatctcacccatcacaccttcggaccagcctatcagctcagggccataggcctcagcctgtaggaactctgatttgttgtgggcagtaagggaccagaggactcttcctgccacagtgacatctcccctaaaggggactgattcttctgcctgctgcaatggaccttcagtccctgagtccctggggttaaccaggtcccatcatgggtacagagggagaggaccttggactcactgcccagtcacctgcacaggatgtgcctgtggcaaacggcacatgattccagtccacagatggcgctacatggggaggttggtggggggttcctccctgagactcagacagaagggactgagctatttgggagtaacccacagttactacacggcaaccataaggctctagaggatggaaaatacggatgggcaggacaggggacagaggcctacttagttaagaggaagccatcgacagggagcttgcccaccatgcacagagccctgggcttgatccccagctctgtgtgaaccatggggggtagcacgtgcctggaatcccagcacttgaagactgaggcaggaaaatggggtgggggtggggggtcttcccaggacatgtttcttggttaaaagaaacgccactgtgacagtactcaacacaggcccctgaggagttagtgaaggatcacccggcccttccctgtttccgctgggctggataatgcaaggcccttgcttcctgaatcccagggctctgcgctggaagacaactgttagtatcccagcattctgcagctactgtaacaaatagcctcaagccaagtagctttaagaagaggagcttgttcttcccatagaggaatccaggtgtcccaagtggctgcgtctgcaggctgctctccctgcggagattttaggggagactcagttcttgtttgtgtgtgtgtacacgggtgcacacgtatgcactgacatgtatacgtgcacgtgaatgtcagaggacgagggcaggtgtcttcttcagttgctctgcacattgtttttttgaggcagggtctctcgctgactagccagcaagcctaaggaactgcttgtttccatcccccagggctggaattgcaaaggccaccacgtagctttttagtttttgaaaatattctacatttattaattttgcatgtgttggggaaggagttcacacatgaggatcaggtgacaactcaaaggcattaattctcttctaccatataggttcctggaatctgactcagggcttcaggctctgaggcaagtgcctttgctgagcctttattttttattttttttaatatggttttgcaaagattgaactcaggactcctgcttgcacactgagcatattatcaatggagccatctctccaatccttgttttgttttcttgaaacagggtctcactgttgagctctatgtagcctatgctgtcctgcaacttgtaatcctcctgcctaaacttaccaaattccagacttgttcttgcttcttctcacttctggggactgctggcatgctggcttgtggctgtcccactctagtccctgtccctgcctccaaggttgtgatgtctctccctatgtactgtatggcctcacccctctcttacaaagaccctggtgatggtatttagatcctacctgtgaaaatcatagctgtctctccatctcaggattcatagccaaattacatatgcaaggatctttttcatctaagtcagggggcagtcatagcaccctctaactaggacatgggtcttggggaaccaccactccattcaactctctacagagccacattctgagggtcctggctcacctatggtctttgtcccctccaggaggcaaactgcaaaaaccacagagtgaatcgggtagtgttcctgggcaacatgaagcggctcctcacgacaggggtctccaggtggaacacaagacagatcgccctctgggaccaggtcagccactgggatgccagccggagggcagggaggggcagccagcctatatctgagctcctgaggtttctgctggaggggtctgcaactctggtggctgtgctggggtttgggaaggagccacactctcttcttagatgcagcctgaccaacaccaacctcctccctacaggaggatctgtccatgccaatgatcgaagaagaaattgatggactctcaggcctcttgttcccattctatgatgctgatacccacatgctctacctggctggaaaggtaggggtgtgtgtggggtagggactgttaattagcaggagattccagtccccattaggatgtctctctggccttatccctaagaaaactaacctaatcattgtggcttcccatgagccagcccagcccctagctctcaccatttctagctacacctctgtcgttcttctgaaatgtcagtgactgagaactcctttcgggataagttggactggaaggataaagatctaagcctgacatgtgaccaatggcagaagatgaaacacctatcaagagatcttccaatgtggccttggcagaaaggctgtatggacatgacaaaaccaacccaccacacacatcacaccaaacactacattgcacatataatgtacataccacatacataccacacatactgactgcaccatacatatgcaccacagagaccatacatacatagtacactgcacacatatcacacatgacactacccatgtatgctgccacataccacaccatacatatgtgtcacacaggctatacatacacaccacattacatacatacacattatacagatgataatatatactacaatgcacacaaacaatgcactacacctacatataccatacatacataccatatataccatatatgcatacacacgtcacagcatagacacactatataaacatgctacagtgcacacgtgccacacacacactcacacagcacacacagcacacaaatcccatgtaccatacagacactcactgtgatcacacatacacacatatcacgtatataccatcccatatccacccctgcccctagtagagctaccaaggcacagggttagctctctcctacagtgccttgggcctaggtctgctggaccctgccctctactctcgttgcttctctgctaccctcagggggatggaaacatccggtactatgagatcagcacggagaagccctacctgagctacctcatggagttccgctccccagccccacagaaaggcctaggtaaggacctggaagctgatgcaggctgctctgtgcagagcaggagatggtgtttattgtcttgtgcatacacaggatcccctttacacaatagtcagactcccaagccacagtcagcaggcagatgggaatgggacccacgcgtgccaccttcggcaggccagctcctctgtacccagcctgtcactcatggcaccagcttggctatctctgtcagcagcagcctgcagggtatgggctctggcttcctcctcagctgtagatgcagagactcactccacagtggggttcacatggtgggaggaggttcagtggctctgaagccaggtctatagcctcagctggagaactggccaggcctagcagggcaagcaagagctccaccattttccttggaccccagcacccagagagacttggaacagaagacttgtgaatttgagggtagaccaggggctatgcagagagaccctgtctcaataaagagggagagagagagggagggagggaggagagatgggtggaagggagcgtattgtagaaatctttttggaagagcagcttccatcccagttggaaagacctagagccctcactcagacttacactacaggaaagacacatggtctgtctgtacttggcacaggaaggtgccaatcatctacgtgcttcgctcttccatgacctcacagggggcggggccacttctgcctaacaaagcaaaagttcagagttagtgactcacccaagaactcctgtgtggaaaagaggcagagtccccgttcaaatcccatttatagaagtccaagctgagctcctagcactgtgcaagctctgcctactcaggaggcgaagctgctcgggacagtctggctagtgaagtgcagacaacacatgtaggtactgctgcttctagaagatcaacagcaagctgtctcttggaccgtgttgaaacctctggagtggagagtggctttgccctcctctctgttctctgcagactgagacaaagaagcagagggaagacagttcattccagaaggtgctaggccctgcagccttgttaagtttgtgtcttgagtttgaggccagcctgggatacatgaccttaaccttgcctgccccctcccctggcaaatagtgactatcatcagtcagaggccgactcaagacatcatgaccaccctctgtcctctgggtgggtctttgcacccaaactgcagccagcctgagaatgtcagaccgtgagcagggacagagaggtccccataaagccccgtgtctctctaggtgtcatgcccaagcatgggttggatgtgtctgcctgcgaggtcttccgcttctacaagctggtgaccctcaagggcctgattgaacccatctccatgattgtaccccggagggtgagtgggcctgggttgggctgcaaagggccccatgttcaatcttactaaccagaagcccagatgaacccagataaaggaggtgtcggggactagaatattcaggctccacctgaagtagggggcggaggacactctcaggtagggatggttggtttgcatgaaaggggtcagttctcgaagggaggcccggggaagacaaagactttgaggtagaatggtaggagtgcgcctagctagatggtcccggctttcccagcggttcccagatatcctttcccttcttcctcccccgtgcagtcagattcctaccaggaggacatttatcccatgacaccaggcacagagccagcgctaacccctgatgaatggctgggaggcatcaaccgaggtacctctgcgggtgggcgggcgggtgggcgcgtgggcaggcgcacaggagccacagaagagctactctccagctcagctagcttcctccacatgatcccttgtccacgtgtgcccttcctcccacacagccagcaagcttgggacagtgatatgtcactctatagcccagcctattggatgacagtgtctccattgcctccccagatcccgtgctgatgtctctgaaggaaggctataagaagtcttcaaaagtggtatttaaggcccccatcagagaaaagaagagcgttgtcgtcaacggcatagatttattagaaaatgtcccacccaggacagagaatgaggtaaggctgcagagtgtcccccacacctcaggaagagtcaggcctttatgttgccactgtgagcttcaggcttggaaggcagctctatcctgggacatttttctatcagtgacacattctgtaagtaacatgtagttggttccctttgcctctgacctggaatgaacttggaagctgggatgtcagagagctctgtctccctccaaacctcaaattcactgacagagatggaacgttatcctcatgtgttgtggacattgtaaatcaccaagagggtccatcttcctggcctcctcatcacagccggccttgacttcctgcttgctggtctgtcatgtttcctgcctcagaggaagagactggctgtttacaagcggcctctttgtaccacgaggaataagagctcatgctgacacagctagagctgtccatggcctctgaagttagctgctttcaggcttgtcaacttccacccccacccccacccccaccccaggcccacatgccaacacagctcagctcaactggtagttataggatgcctactgtgtgtcagacccgtggcctgatgcagctggaagcccaactggttgtataagtccatctgtgtatgaattcgggctctgccatttccactgagtgtcctgacttgtccagctgttgtgatatgctagagagatggggcacagtacccagcagtcttcatggctcacactaagtgctcagaaaggctggctgcattagccctctgttgctgtgtaacacattacccacagcctatttacagctccaaggattagttacctttctcattgttgtgactaaaatacctgaaggaggaagcagggagagtttggggggagcctacagtcgggggagatacagtccactatggcagggaaatcacggcagcaccaggaagaggtatctggtcccatccacaatcaggaaacagagagcaaacagaagtagggcggggctataaaacttataatctcacctagggaggcatcacctcctaaaggttccccaaccttcccagatagcacccccagttggaaacaacgtgttcaaacacatgggggggggcattccatactcaaagcaaaatactttgccaaggctgatcagctttcagccatctctgggtgcctgtggttcaagtcgcttatgagctgcagctatgtcagctggggccgcagtcacagcccggggtcctagctaagggaggacctgcttggatattgattctcatagctgctatccggcagaggacctcagtcctcactgtcccagccacgtggacttcagtaaatgctagcttccgccatgtcagccaacttcctgcgcagcaagagaggactccaagatggaagccaaagaggttctgtaaggtgatctgggatgatacatcaccaatgctgccatgccctgcgtgtttggcacaagctgctaggttccgctcagttcagtggggagaatggcaagcaccatcttagatcaggctgttggtccacaaacgtagactatcaccatcatcagtaaagatcactgcacttcacctcagggatcatccttaaaagagcatctggcaggcagcttgatcacaggcatgacatgtgtctatgcgggctgggggtgtggctcagctaatagaatgcttgcctggtatgccaaaggacccgggttcgatacccagtaccgcatcagctgggcatatatggtagacacctgtaatcctagcgcctctgaagtagaatccatactgagctagagacctgggataggggagagagggttatgtgccactgtagaaagatgttcatagccgggcatggtggtgcacgcctttaatcccagcactcgggaggcagaggcaggcagatttctgagttcgaggccagcctggtctacagagtgagttccaggacagccagggctacacagagaaaccctgtctcgaaaaaccaaaaaaaaaaaaaaaaaagaaagaaagaaaaagaaagaaagatggatgttcatagttctagaaaggatgaaatcttgtgataaacagggttcttctcaaaataacccaggcggagggcagtggtagaagacttggaactggagcaaagctgggtggcaggcgctagggagctcctgggaccatttttcttatttttgtttatatttaacattttcagttttaaaaacaattttttaataaaagaaaagaaacgaaagaaataaagaaccctgccttttgaaggcagaaatatgggttgccgagattgcccgagtgagcaatcgtgagggctggatccctgtctcagccctgagggtgaagcaggagggctggaggggatgaagtggagtgacatccagctacccagatgcctatatggattggaaccagtgacctggggaaagcattccgagttctctgtgcaggtgagacagagcccgccatcctcctgtggctaagccgtgcctctcccaccttgggaataaataactcagacgccgaggcctcagctttacccatagttacgacattctgaaagccaggaagtaactgataagcaagcaggacaagaaagggaaacagccatctacgggcaaggagacagacagctcagaagcagggcatgatggcgggcgccagaaagatcagcatcgggaagctgaggcaggaggattgccatgagtttgagatagcatgggctacatagtgagttctaggccagattaggctgtgtgtgtatgtgttgtttagtgttgtgacaggctttcctctagccctggctggcctcaaactcactatttatccaagggtgatcttgaacttctccttctcttggttgctgagattacaggcgtgtgacaccacgtctgttttatatagtgctgggtagcaaacccaatacttttcgcatgctagacaatacgctaccaggtgagctgcatcccagctccaggcctgggacatttgacaggtgcgtatggttggaaagccactataaccagtctccatggttacatcacctatacttggttgtttaagcatcgcctttagcaagactactctctacttaacatttttatagaaatggcaatgctctgtcctcattggtgtatgttatacttaattaaattataaaagcacatacataatcaaatgtaatcatgccagaacctcccaacacagtgcctgtggatatcccagcttgctttctagtgctgtggttactatgtggttactatgtggttactatgctaaagtaagttggagaggaatgagtttatctgacttacacttccacatcccagtccatcactgagggaaggcaggaacctggaggcaggaactgaagcacagaccaagcaagaatgtggcttgctcaagtgcagggcccctgctggtagcctactttcccaatcagtgttttgtgggcatctgttagtatatttcacagaagcaatcagaatctagtagacccagggagtcgactgtacgaaggtctgccagggtaccaactctttacccaaaccactgcgcacagacgcacacacaaggccaagtgtcattctgtaccctcaattgcctcaagaagagaagagggactggctctgggttcgatcctctaaaacagagcaacaacaacacagataaccctagcgcctgggaggaagagacaggaagatcctgagttcaaggtcatgctcaactacttagtaagtttgaggccagcatgggctatatgagaccttatctttaaaagaaaagtcttagattttttttttaagaggcagaagcaggaacacccggagtttgagccattctctgctacatagcaagttggaatgtggccaacctgagctacaagaaagaagaaaaggatgggggggggggggcagaagggaagtggaggcaggaggatcaggagttcaaggccagcctcagacctgaatgagctagagtgaacccctaactcaaacaaacaaaggctttagttcagacccataaaggggccagcttgagatgctgagaagcggcctccctcggacaggcctgcgtggctcccatgctttactgttctcccatcaggggtaagtaggagcctggaaggataactgcagagagcaccgggctggctgtctcagggtgggaagaagcctggggcaagtgagcgggcatggcaggtctgggtggggtaggatggggcgtctgaaaaccttggtcctccaaagtcctcctcacctactctctccccacaccccttgctgtaccccagctcctcaggatgttctttaggcagcaggatgagattcgaaggctgaaggaggagctggcacagaaggacatccggctccgtcagctccagctcgaactgaaaaacctgcgcaacaaccccaagaactgctagccccgcctcgggctgtgttagccccgccttgggctgagtaagccccgcctcgggctgttttccaagccgatctctccgttgtttttactggtccctaaactgcctcttatctgtagagcccagagacagggcctggactggagctggggaccagtcggtagaccctacctaccacctcaagaactggaagctgacctttgacctcctgacttcatgctaacatcggtcccccagcctctcctagaaagcccacccctgactggctgcggcttctccttgcagccccaagagccaggcttttccccttggctcccggcaagtctcctcagagggacaggatgagcgggattacagcctggtttagaccttgaatgtgtcccctgcagaggggctgccaggacctatctacacaggaaccagtcgctctgaccccagcattccttctgaagcacagagagagagggctggattgaggggagagcgctctgctcaccttctgcctccttctgctcctgctgccgagcaagctcaagtcatctcacccaatggttgagcacctggcagcccgcccttttctttctgaactccctcccacccctttgtcttcagggaatgaagaggacatgctccacggccataatgaccctttgcctacctaccctgtggttctcttcaaagctcttttacaccccttttccatttaattcgtgaagcaggcagagtaaggattagtgtccctacctgtcaaatgacagaaccgaggggtcactcagagggtcagcagcagaccaagtacccttggtatccagagctttcggccagggcccttcccactgtattgagatgccaatccccttgtgggcttccccagaaagagacctggaagccacttccactgtctgcccaacaccagtagtgccaacacgcaggctgaggctctcacactcagtgccctggaccctcctggcctgcgctccttgccttcactccctgctgggggggttggggggggggggctccatctgacagtgaggcctcttcctggaagctgaggcagagagaaagaatagagcttggcccttgggcaggcagagcaagatggcttccagggacgctctgcctgtgtctccctccaccccgctcccttcccactcccaaccctgctatctcagccactttcagccttacacacacaggatgaccacagccactccacccacatagcactttaaagtttacccaggtttttgacacatagatctcaccgactcgtgcatctgccctactttacagtgaaggtaaccaggaaatggccctctgcacgcagctctgggatgcggcatctctttggtcctctacacgcttgctttagcccctctcccctccctctctccattctccacctaacacatggagctcaaaagcactggtgtcaggacagtcaccgccctttgggtagaggagatgtggggacctcggtcaccggctgggatctgctatacataggacacttcttgcctgcccaccctgcaaaacttcccaactgcagatgccctccaggcgagctgaggtgagatttccccagccctggggcctctcctctccaaccaccgactccccactcccagcgtgctaaagcgagttctcctccgcaccaccacagctagactgtcagctctcatctcccctccacacttctggaatttcctttctctccattgacctttgtggtcttctgtgattatttatgctgcctcccaaggttagaattgaaataaaatgttttcaggttatcaagccatgttttcacgctatcgtggccatgtcatttagccgcagggagatcctacgttggtcacctcgttgtctctgtggccagcggcacattcggctcctctgtctttctgaaatgacagctacctctgtacagctatcctgccacattctgttcatctgacactgttgacaaccccggggacgacagtgctttgctgcgggggctgtcctgtacactgtacacttgtcagtgtccctgcctgccttaacactccaggtgtcatggcaacctcctcctagttttgacagacaaaaatgccctgcatattattcagtgtaattcagaactactgttctggggaaagggacccaccaccaaacctgacagcctgggttgtagaaggagaaaacagactccaattatcctctgacctccacgcgtttgacatggcactcttgggcacttgtatacatggacacacatataaatattaaaattttttacttcaaaaaaattgataacgtgtgtgcagtaccaacagtggccagaaggtggcgtcaggttccctggagctggagttacagatggatgtgagacactatgtgggtgctgggaactgaacatgggtcctctgcaagggcagccagtgctctaactactgagcaacctctccatatttcctttttttttttttttaaataaactacctcttacagctattcaaaaggtatttgctatggacaaatatagtggttcataattccactcttagaggctaaagcaggaaggttatcaagggttccagtccagcctgagatacacagtaagaaagaccctgtttcaaaagagggcaaggcacaccaaggatgtagatcagttggtagggtgcttacctagaatgtgtgaagccctgaatctgatcacaggcactacataaaccagatgtggcagcacaactttgtaatcctagcacttgggaagtggggacaggaagatcagaagttcaaagttaaccttggttaaatagggaattcaagaccagcctgggctatataaagaccatgtttgttttgtatctaatcctgtgctggggtctgggaagactagtgtcttacactggaccggtacaggctgcaaggtactggtccatgcatttgactccctaggttctgttactgggctggtatggccaagatcactgagccagtgtcatggggaagccgaaagataagggtcttctgggtctggggacagaggaactgaggggagcctgcttcggaaggaagctgggttctctcttgagaccagaaatggtggacaccagtactctctcaccaaggcaggcctgtctgagaagagggctgtcagtctaccaaggaaatggatgccacaggtaactgaggggagccagaggagctagcacaacttaagtggggagcatcaggagactgtagggaaactgcacacagaacgctgggccaggtgagggtttaaatcccactgtggcctcagtgtgggaaatcctgcctgtcactcgtctgcacaggttatcattttcccgatctgtacaataaggggtaagaacaattcccagggcccctacctggtcaaacacctgagatttccgtggcaccagctgccaggggataaaaaagtccccaaagctgtgcattgcctggcataagtgatacagacaatctcgccacgaaaaagggaagcagctcggggctcctgtgaggcctgaaggcctggagtttctgcttttagattaattctcaaaccctaagttttcaggaattctgaattcactcagagtctggtccgtgtacgcttctgctcatcagatgtcagggaaccccgggctgtcacctggctgagaccgccctgcctgggcccaggggagcaaggaaaggtgtgcacatgtgcatgtgccttctcctctgccccgcctgcttctaccccagcagaacagcttataatggtaaattacctacagtcagtaggagcccatattccaaactgtgtttgttgagtagtcaccttcccattggctatttatgtgtccttagagtcttcctgtgctgtgctgcggttgtagctcagcagagggctggcttagaatgctggaaaccctgagttccgtccccgtcactgcataaatcagccatggcagtctcagcacataggaggtggaggcatgaggtccagaagtttgaggatatctttgactatgtagtgagttcaaggccagcctgagctacatgagacactgtcttaaaaaaacaaaacaaaacaaaacaaaacaaaacacttaggctatgataacttttacttgtagtcttgtatgctggtctctgtgccagtgctgacccagccctccacagagctttaattatgtaaagatagggatgggagggagccatccatggctctttgaaccatctctgttgacttgcttcccactagatgttattcttgctttttccccaggtaaagatgtcttgggctaaatttcagagccttcttgtctaggaatgagcctttctgtctctacaggcaaggacacctctcccagttctaactcctatcctgaaacctgactggatttccaatttggcttagcacagaccaagtagctggataactgggtgctgtaagctgagcctaaggaacgccagccatatctatctgttggcgttcgaccaccagcagggctcagagtcctgatcctggaggggtttcactccgggacgggttcaaggtggggtggtcatcagtctggggaggttgctgtctcctgagctgtctcctgagatctcaagatgggttcaggcatttttagactcctcgctctgggcaagcatccaagactgtcagcagacccatgcagaacctggctgcttcttcactgtgagaaatgacttcatcctgagaacaacccccagccctgccctgccttccagcttggaagaactaagatgccgcggcaggggcatgcagcagaggcagacacttaaccttggccaggaagaattacaagattcactagagctcttatgcagagggaggaagagtggtgtgtgtgtgtgtnnnnnnnnnnnnnnnnnnnnnnnnnnnnnnnnnnnnnnnnnnnnnnnnnnnnnnnnnnnnnnnnnnnnnnnnnnnnnnnnnnnnnnnnnnnnnnnnnnnnnnnnnnnnnnnnnnnnnnnnnnnnnnnnnnnnnnnnnnnnnnnnnnnnnnnnnnnnnnnnnnnnnnnnnnnnnnnnnnnnnnnnnnnnnnnnnnnnnnnnnnnnnnnnnnnnnnnnnnnnnnnnnnnnnngtggtcactgtctggcatcactgtccctttaggctatccattggcttcccagagccctgcagccaagacacacacacactcacacacacacacacacacacggatgctaaccaatggggcctaaatgaagggaagaccggagctgaaaacacagatcttagatttcaaggtcatagtaatcacccaagatccaaacatcagaaagaatttgctaaaacttgaaccgagccagcaggtggcagattacagccctctactgttctaagctaggcgccttctgccatctcccatccaacccctgaataaatgacacagactaccggggcttcctgatgaagcaggcactaagtctagccaggatttgaaccacccatgcatgagggagggagagagggagggagnnnnnnnnnnnnnnnnnnnnnnnnnnnnnnnnnnnnnnnnnnnnnnnnnnnnnnnnnnnnnnnnnnnnnnnnnnnnnnnnnnnnnnnnnnnnnnnnnnnnnnnnnnnnnnnnnnnnnnnnnnnnnnnnnnnnnnnnnnnnnnnnnnnnnnnnnnnnnnnnnnnnnnnnnnnnnnnnnnnnnnnnnnnnnnnnnnnnnnnnnnnnnnnnnnnnnnnnnnnnnnnnnnnnnnnnnnnnnnnnnnnnnnnnnnnnnnnnnnnnnnnnnnnnnnnnnnnnnnnnnnnnnnnnnnnnnnnnnnnnnnnnnnnnnnnnnnnnnnnnnnnnnnnnnnnnnnnnnnnnnnnnnnnnnnnnnnnnnnnnnnnnnnnnnnnnnnnnnnnnnnnnnnnnnnnnnnnnnnnnnnnnnnnnnnnnnnnnnnnnnnnnnnnnnnnnnnnnnnnnnnnnnnnnnnnnnnnnnnnnnnnnnnnnnnnnnnnnnnnnnnnnnnnnnnnnnnnnnnnnnnnnnnnnnnnnnnnnnnnnnnnnnnnnnnnnnnnnnnnnnnnnnnnnnnnnnnnnnnnnnnnnnnnnnnnnnnnnnnnnnnnnnnnnnnnnnnnnnnnnnnnnnnnnnnnnnnnnnnnnnnnnnnnnnnnnnnnnnnnnnnnnnnnnnnnnnnnnnnnnnnnnnnnnnnnnnnnnnnnnnnnnnnnnnnnnnnnnnnnnnnnnnnnnnnnnnnnnnnnnnnnnnntggtttcgctcgctgcttcgacctgggggtgggggtaagggtgggggtggggatacaagggcatcattcaagcatcaacaccaggtccagttcgggagctagtggcctggataacgttgtgagagagcgtgctgagctatgggattgaccttgactgaaggagagagggggcacaaggacacgttagaatcctcggtaacagaactagagatggatgagatgatccccactatccaaggggacacaccattgaacttagcaaacgcccccttgagacacccaaaggaggagacagtcttaagaaactgcagagtgtttctctgtgccgtttagtccagatgtaaaagatttgccgagtacttttatccccctgaaagacagggtgcagagtttcttggagcccaaagtgtccttgagctcagacggtagctgaagaggactttgggttcctgatccttctgctgatcctcctagtgctgaggtcgtccgtatgagtcatcacacctgacgcatgtcctgctggagatccactccctgggcttcatggtggacaagcatcctaccaactgagctacaccccaaccctgctggctccttttatctcgtagagacctgtgctgccccttggcgcttcctagcagtataattagaaagtccctttataccttacaggtctccttccctgacatcatgccctgtcggcttctgaagatgcgtgaattccacagttccccacaaaatcatttggaaaaaagataataaattcacattctttgcgcttgggttttggataacttttcataaaaaaaaaaaaagtatttagtcagatgctcctcaaatgtctcctgaacccgaaaccctccttggtgcttcaacggaaggatgggaagattcaattcttggtctcagagagagtacagtgtagtgtagaattcatatagagattgcaatctggcatataactcaagtgcatatgcagaacacgtgtgcaaggactaagatagtagggactgtctccgcagaagggggaacaggctgtgtctgcaaggcaggagagatggctcagaggccaaacgtcttgggaaggattccaggtctgttcctagcatctctgtgctgtggctcacaatctgatgcccccttctggcctctgtggacacacacacacacacacacacacacacacggcatgctcttacacacacacacacatttttccacagcacacaactgttttccacagaaggggtttgatttgttcagctgtcttttgaggcggtgtctcacgtaccccagactgaccttgcatttactgtagaacccaggctattcttggcctcccaatcctcctgcctccacctcccatgcctaatgctgtctttgttttgggggacaggatcttgctaagtagcccaggctatcctcacactcatgatcctcagtccacagacgccttcgtctgctcccaggggttaggatgacagggatgtgccatcacatctggaatggcctggttttcttttcctttttgtttttctttttatgagagtttgcctggatgtaaagctatgcaccccaagccaacggtgctcaaggaggccacaagatggcatcaaatccatttgaattggggttacaaatgactgtgagccaccaagtgggcactgggaactgaacatgggacctcaggaagagcagccatcctcaaacccctccctaggtcttcttgatgtacactgccttgcttgatggtctcagcctgttttgcccactaacctcccccatctccttcctttagaaggtacagccccagtggtatccacccttccccagaccagtgcttgtagcataaaccctatgcccccctttccctggcaatgagcccttgtcttcaagtcaaaagccttgctttcaagtctactgcttattgtctcagccatgaactttgtttttggtttcacttttgaacctgtctccatcagctcaagctggcttcaggtgttcgcagcccaattgcctctaccttgcaagtgctgagattacaggcttgttccccacaaaccatgccagccataaacatttgaaatctgtctagaaaactaagagttgaacattgactgtttgtttatctatgccttccaatgatcacaaatctgaccactggaactgaacccataggcttgatgaggtatctgtagcttggttggtagagtgcttgcttgcccaacatcccaaatgcctgggtttgatccccagcactgcataagctggatggtaatgctcacctgtctttttaaaaaggagagagagtgagacagagacagggaggcagagagcggggagtgcctcaggaactatggagtcaacgattgcttatttccaaagcccacactcaccacctcctcctaccatacatatataactggatcatgaaaatggccaaagaaattaagaccctgtggaatgggggagctaattatcatgtggcggtttgaatttaatgtcccccataggcttttgaaaggagtaggacatatggccttgttggaatgggtgtggctttgttagaggaagtgtgtcgctaggcgtgggctttgaggtttcagatgctcaaaccaggcccagtggctaatcctttatacctgctaatccaggcataaagctctcagttactcccaagcaccatgtctgcctgcacactgccatgtttcccaccatgaccgtaatggacttaacctctgagctgtaagccagtcccaattaaatgttttcctttgtaagagtttctgtggtcatggtgtctcttcacagcaatagaaactctaagacaaatgatacaaaactagaaaacactgttcttttgctaactttcagttgacatctgctggacaaacattctgtggtaggtgtcagtgacacagaacagactgaaaagccaggcttggtggtgcatgcctgtaatcccagcattagggagctacagacaagaggatcaacagtataaagtcaccctcagcttcttagtccattggagaccaatctggggatacacgagaccctgtcccaagtggggaacaaaaggggacagcgagacttacatcactggtttaacaagagactcaggtgtgtaggttaggaagtgcactcctttgaatgattatgcacaagagcagtcgtcacactgcagagggcaaaggaaacctattctcccaaagaaaaagaaaggtcttggggaaaccaagcccatccaaagtcaccaggaaggacagcggctgtcacagagtgagcctggaacagctgaagccaagaggaaggctgacaagttgcttagaagtcactcttcaggcctggagaacctgggggtggggggagtttcacaccaggctacctggccaaaaagcttcagccccaacctgggcaaagtcatacaaggtttacagacacatgccaccatgacccacctttccagggcttccatggtgacagacagaggtgaggagtcaggagggcactttcccagtcaacaggatttggtggccttttgcctacaagagactaacagtgccaagcagggaggaattgtcaccgaagtgttcccaagagaatgcaccatgcctgccatcagggaaggcttcccagggcatcgttgctagtaggaactaagccttgaagagactcaggtgtggataaaacaggtagaaaagcaagacgggtgagaggaggccttgggaagcagcaatcctgggttcagtgcaatggtatgcaggtccctccccgactttccctatctaacagcctaaggtaactatcttagggaattagcattccatactgaagaagcaggcttcgctgacagctcctcctgtacatctgtaagacctgtctgcccattcgcccctatctccctggaccttccctacaggaagagcaagttcacctcccaaacactggcttgactagcaagggatttgtctaagttagggtttccattgctatgaagagacaccatgaccaatgcaactcttaagaaggcaaatatttcaatggagctggcttacattttcagaggcttagtccattatcatcatagcaagaagcatggcagcatccaggcagatatggtgctagaggaggagctgagagtcctccatcttaatccaaagacagccaggagaagactgtcttccaggcagctaggatgaagatcaaagcccacccccacagtgacacatttctaccaaggccacacctactccaacaaggccatacctcttaagagtgccactccctggaccaagcatatacaaaccaccacaggatattttcccgttttcctaaaaactccaagtgaaacaattgaatgatctgagatctggatttaggttctagctattcatgaaatgggctacagtgttgcatacactaggcctggtggcacaagcctgagatcccagcacttgggaggcagaagtgaggatgttaggagttcaaggttagcctcagctacatattaagtttgcagccttcttaagctgcttgagatcctatctcaaaaaatagcaaaacaaaaaaaaacaaaaaaaacaaaaaaaaaacagaaaaacaaaacaaacaaaccaacaacagaaccagtgatggatcctgtcaaagaacctagtggggaaacccccactctgttcccgattcggtgtgcacccaagaatcacgaacaaacagaccatcttgctgtaaaaacacgaggtagtttaatggctgagctccgggtcgaaatgtatctcatgcaggagacagtggattcgaccacgaggcttggaagctaggggttttttatagaaaagggtctggggctgggggaggaattggcacggtttcacatgattggtccatttaaacatcagcagggaggaattggcgagatttcacatgattggtccatttaaacatcagcagactgtacatgcagataacatttaacttaagtcagaagggcgggagatagggaggcgccgggccagtcccatcaagtcattctctttatctttatggccaagcagcctcaggaatgtcttaacgacaggcctgcccgggcatgtcctggcctgttctgctatgttctcagcctcaggtttcaaagctcacaaacaattctttgggctatttgacataaattacatgaatcacaggtctcaagttttattttctttcacctggaatcccaacactggggcagccaaggcaggtgaattaccgtaaatacaaggccagctgggaaactaaaaagtgaataataaaacaaaatgtgttggtgggagctacccagccttctcctggggtatgagagtgccactgaggtggggctgctgaacaaaaccaccaggagtgccattctaaccaaagccacagtgaacaaagccaccagagtgccattctaaccaaggcccagtgaacaaagccaccaggagtgccattctaaccaaggctccagtcactgaaaagtcagagggccagagagtaactacaacttggcag

SEQ ID NO: 2261 - DNA, 3266 bp, Mus musculus
atagatgctcggccgcggctgacatcagccagcggcctcccgagcgcgcggtccccagcccggcccagccgcctgccgccgcccgcgcccagccccaccgcccgctttctgtatgactgtcacaaagatgtcctggcgaccgcagtaccgcagttccaagtttcggaacgtgtatgggaaagcggccaacagggagcactgctttgacgggatccccatcaccaagaatgtacatgacaaccacttctgtgcagtcaacgcccgcttcctggccatagtcactgagagcgcaggaggtggctccttcctcgtcatccccctggagcagacaggcagaatcgagccaaactaccccaaggtatgcggtcatcagggcaacgtgctggacatcaaatggaaccccttcattgacaacatcatcgcctcttgctccgaggacacttcggtgcggatctgggagatccctgacggtgggctgaagcggaacatgaccgaggcgctcctggagctccacggacacagccgccgtgtggggctggttgagtggcaccccacgaccaacaacattctcttcagcgctggctatgactacaaggtcctcatctggaacctggacataggcgagccagtgaaaatgattgactgccacaccgacgtgatcctctgcatgtccttcaatacagacggcagcctgctcaccaccacatgcaaggacaagaagctgcgtgtgattgaaccccgctccggccgtgttctacaggaggcaaactgcaaaaaccacagagtgaatcgggtagtgttcctgggcaacatgaagcggctcctcacgacaggggtctccaggtggaacacaagacagatcgccctctgggaccaggaggatctgtccatgccaatgatcgaagaagaaattgatggactctcaggcctcttgttcccattctatgatgctgatacccacatgctctacctggctggaaagggggatggaaacatccggtactatgagatcagcacggagaagccctacctgagctacctcatggagttccgctccccagccccacagaaaggcctaggtgtcatgcccaagcatgggttggatgtgtctgcctgcgaggtcttccgcttctacaagctggtgaccctcaagggcctgattgaacccatctccatgattgtaccccggaggtcagattcctaccaggaggacatttatcccatgacaccaggcacagagccagcgctaacccctgatgaatggctgggaggcatcaaccgagatcccgtgctgatgtctctgaaggaaggctataagaagtcttcaaaagtggtatttaaggcccccatcagagaaaagaagagcgttgtcgtcaacggcatagatttattagaaaatgtcccacccaggacagagaatgagctcctcaggatgttctttaggcagcaggatgagattcgaaggctgaaggaggagctggcacagaaggacatccggctccgtcagctccagctcgaactgaaaaacctgcgcaacaaccccaagaactgctagccccgcctcgggctgttttccaagccgatctctccgttgtttttactggtccctaaactgcctcttatctgtagagcccagagacagggcctggactggagctggggaccagtcggtagaccctacctaccacctcaagaactggaagctgacctttgacctcctgacttcatgctaacatcggtcccccagcctctcctagaaagcccacccctgactggctgcggcttctccttgcagccccaagagccaggcttttccccttggctcccggcaagtctcctcagagggacaggatgagcgggattacagcctggtttagaccttgaatgtgtcccctgcagaggggctgccaggacctatctacacaggaaccagtcgctctgaccccagcattccttctgaagcacagagagagagggctggattgaggggagagcgctctgctcaccttctgcctccttctgctcctgctgccgagcaagctcaagtcatctcacccaatggttgagcacctggcagcccgcccttttctttctgaactccctcccacccctttgtcttcagggaatgaagaggacatgctccacggccataatgaccctttgcctacctaccctgtggttctcttcaaagctcttttacaccccttttccatttaattcgtgaagcaggcagagtaaggattagtgtccctacctgtcaaatgacagaaccgaggggtcactcagagggtcagcagcagaccaagtacccttggtatccagagctttcggccagggcccttcccactgtattgagatgccaatccccttgtgggcttccccagaaagagacctggaagccacttccactgtctgcccaacaccagtagtgccaacacgcaggctgaggctctcacactcagtgccctggaccctcctggcctgcgctccttgccttcactccctgctgggggggttggggggggggggctccatctgacagtgaggcctcttcctggaagctgaggcagagagaaagaatagagcttggcccttgggcaggcagagcaagatggcttccagggacgctctgcctgtgtctccctccaccccgctcccttcccactcccaaccctgctatctcagccactttcagccttacacacacaggatgaccacagccactccacccacatagcactttaaagtttacccaggtttttgacacatagatctcaccgactcgtgcatctgccctactttacagtgaaggtaaccaggaaatggccctctgcacgcagctctgggatgcggcatctctttggtcctctacacgcttgctttagcccctctcccctccctctctccattctccacctaacacatggagctcaaaagcactggtgtcaggacagtcaccgccctttgggtagaggagatgtggggacctcggtcaccggctgggatctgctatacataggacacttcttgcctgcccaccctgcaaaacttcccaactgcagatgccctccaggcgagctgaggtgagatttccccagccctggggcctctcctctccaaccaccgactccccactcccagcgtgctaaagcgagttctcctccgcaccaccacagctagactgtcagctctcatctcccctccacacttctggaatttcctttctctccattgacctttgtggtcttctgtgattatttatgctg

SEQ ID NO: 2262 - protein, 508 aa, Mus musculus
HQPAASRRPQPGPAACRRPRPAPPPAFCMTVTKMSWRPQYRSSKFRNVYGKAANREHCFDGIPITKNVHDNHFCAVNARFLAIVTESAGGGSFLVIPLEQTGRIEPNYPKVCGHQGNVLDIKWNPFIDNIIASCSEDTSVRIWEIPDGGLKRNMTEALLELHGHSRRVGLVEWHPTTNNILFSAGYDYKVLIWNLDIGEPVKMIDCHTDVILCMSFNTDGSLLTTTCKDKKLRVIEPRSGRVLQEANCKNHRVNRVVFLGNMKRLLTTGVSRWNTRQIALWDQEDLSMPMIEEEIDGLSGLLFPFYDADTHMLYLAGKGDGNIRYYEISTEKPYLSYLMEFRSPAPQKGLGVMPKHGLDVSACEVFRFYKLVTLKGLIEPISMIVPRRSDSYQEDIYPMTPGTEPALTPDEWLGGINRDPVLMSLKEGYKKSSKVVFKAPIREKKSVVVNGIDLLENVPPRTENELLRMFFRQQDEIRRLKEELAQKDIRLRQLQLELKNLRNNPKNC

SEQ ID NO: 2263 - DNA, 160103 bp, Homo sapiens
accatcacagtatcacacagagtagtttcactgccctaaaaatcctctgtgctccacctgttcatccctccccactaacccctggccaccactgatcttttcgctgtctccatagttctgccttttccacaatgtcatctagttggaatcatgcagtctgtagcctttggagactggcttctctcacttagtgatatgcatttaaggttcctctatgtgttttcatgacttgatagctcatttctttttgacacggaataatattgcattgtctggatgtaccacagtttatttatctgttcacctactgaaggacatcttagttgtgcccaagttttggcaattctgaacaaagctactgaaaacatctgtgtgctggttttcgtgtggacataagatttcaactcctctgggtaaactccagggagaacgattgctggatcatatggtaagaataggtttcgttttgtaagaaattgccacagggtcttccaaagtggctgtactgttgcattcctaccaacaatgaatgagagttcctgtggctccacatcttccccagcatttggtgttgtcagtgtttagagctttgcccccaatttgcagatgaggaaaccgaggtgcagagagtgaaaggcttgcccagggagtggcagaattgccctcccactccacctccttctcacacacataacccctacagtgcacaggctgatgtgtgatctttggctgaggagtcattggtcagtggggtctgtggccttgggaaagttctcacctgcagagagaggctactgtactctggtgggtcagctgggcaagaggccttacagaggtgataagaacaacagtgcaaacttgcagggtccaccatttctcttgccatatgtagatgactaggtggcatggtaggaagagctaggcttggagttggatacggggtttaatcataggtctgccacttactagctatgtgactgcatgtaagtcatatagcctcttccagcctaaatgagtgtaacttcatgggatcctcggaaggagcaagggaggctctgcatatagagtacttgcatgtaaacacagcagttgtttagagcttacaccatctatctgcataaggactattgatctgtggttttcttttcttgtgatgtcttcgtctgaatttggtaatgctggccccatagaatgagttaggggctactgtggatcttgatcatgaagtcgtaagacatcgaaggaaacttccgggtggtgactcataagctggtgctcttacactgaggcaatatcagaggctaagattttcagaaaagcagtgtgcccacaaagtgagctgatcagaggaaccccaaatacgaaagttgaagtgcttacaagttgtccttttgttctcttgtgaagtacaatgaaggctttggaagctgtggtctgtcccagttacactgaggggaatagtcagtgtatttcccttagggaaggaaagggtctgtgttcaaacagtcagaagacccccatggtgcagcagaaagagccgaggatggacccaggcccactacacgtagttttttttttttttttttttttttttttagagactgggtctcactgtattgcccaggttggtctccaactcctggactcaatcctccagcctcagccgcccacagtgctgggattacaggcatgagccactgtgcccagctatgttattattcctaatcttgaattcctatttttgatgatggcacaaagcacttaatcaggattttgttcttttggaagaaagtgcgaaggaagcagagaggagggaatggatgattgacatctaaaagccatgccccaggctgtggaagaatttgggatagtgatctggatggtaaatatctctttaaagagctgcccaagcacatttaaatgagtttctttgttagtttctgaggaatttccctgtaaccttcctttcccatcctgccccagccacctgttctgtactcagtactcaatattcagtactcagtacatgtaaatacagatgcaaccagcattaaatacacagtagtaggggacatagggaactgcagaggcaaggagattcatattattttaatacaaatagatccctaagagccatggcattgtgaataacagcagcattgtcatctttttctcatggtgggagataagaaattagccaggaatgacatttgacaataaagaacacaaagagatggttcctggacctgaacaagaaaagataattcttggacactgccaaagaatcttcacatgcacagattggaaaataaacaaatatgttactacctcttttctcctcattattgtaaaccttcatcaatacatcataatacctcatataggccaagaatttttaattacattttaaaatcaaattgtttatatagacacaggtcccacacacaaaaaacattcgcccaaggcactgcacaagctgagtacagctgtaaccggtaacctgggagataagccttgttcttgggaacaggagtttgaaacatctttgatcaagaagagaccctggcaaccaaagcctgctctttacaaatataacgggctgaaatgcagcaatggcaatgcctggaggtatttagccccaaggaggtggtaagggctgggagctcagtgcagggaatgaaatgatgtaaccggggtggtggtggtggggtccccactgtaatgagaaggctctctgctgatctctgaaggagagaactcctgaggggggcagacacagaagaacagggataagcaggacctggggggcactgcccaggactggtctggcccaggggcatctgggaaggggctgtgggctgtcagtggatctccaaggccttcctcccagttccagaggccccactcttgctctccaaattgaggagcagctcttccaggaggcaatcagggacttgcccttccagtcactggcagcagctgcaggttcagacttagagggaagagtgcaggaagtccaggatggtcccaggagccactaaatctgcataggattttaaatcaaagcatgaaatgtcaatgctactgtcccttgctggagctgtttcacgttacctgccgcttgccttgcttttgctccctgccatgcttgtaacctccttgtcttcggtggaaagatctaagaagcctctggctcaggctgaaaatttggctatgttgttcagctatgttgcctgagagatggaaggtgaaaacaactccttcatatctgttttgcatgatttatctgacagggcactcaccacaccttatcatgtaaatccgtggttctcaaactggggcagaaggggtgtcagaatacctccttgctgctcaccaccccccagctccaggtttctgaatcaatctgcctggtatggagccccataatttgcatttcaaaaaagctcccaggtgaaactgaggctggtttggggcccacactttgagaactgctgattaggtgttatcaaaatttagatcctaaacgactggaaggatctggaaaatctggttccagaaaaggctggaaatctggttcccaagtcccagctggctctatacaagggactgggcttctttgccatcatggccccaaggagattctaggggagcagccctctgggaggaggctgccctggggtttcctcactgtgcccaggtctgcggctccttctccctggttcatttccacacatgcacacacatgcacagatacatacagtcctacacactcattctcacattcagacacacacccacacacacttgcagagggggtcgggaccaagaggcagctgctcaggtgagggccccccagccaaggatgcagcccgtagaggcctcagaccagcctgtgttcaggtggctccctcagtgatcacccctcagaggtgaaagacaacaccccagggcagggccccccaacccccagcatcccccatgccaaagtcggcatatgtgcattgtacagaggccacggagaaaaggcaagagagacaaagagagaaagagactagcagtgggacaaagagaagagagagacgtccacagagacaggagatggagacaaccacacagagagatgagaagggcaggagggtggaaataagcagatctggtgggggcagagctggaggagagacaggaggaagagcaaaaccatgaaggtcaaggggatggcagcagagaggtgcgcctctgccaggccagagagcagggaagggttgtggtgggtagagggcaggaaggggaaacgggcatccctgaggaagtgtggggaggtgcaaagcatggaaaggtgaatgcagcagagaagcagggcagggtgggagctgaggcatgtggtgggggacagcggctgggtgacaaaacagacagaaagggagaaatgggagacccacatacagagaaggagagacccgaagctgactgagcacagcactatgtgctggaattactaagtgaaagagccagtccccgtcctcaagccggggatgcttcattctccaggagcttgtcaaatacacaaacagaaaatgttaaaaccatccacaggagcagagaaaacgaggctcagggagttgtggaaagcagcacagaggctgtgcagctagaccattccaatcacagtctaggaaggctttctggaggaggcgatacctaaggaaagactgaagaagggtcagctaggtgctgacggggagagaagggccaggttatggtgagatgggaagcctgggggatgggggcaggtcttggaggaccctgttggacttcaacctgaggacaccagggagcccctgatggggttcaagcagccagatctgtgtgtgcaagagctgctgggggagaacagactgagttgcacaagagagcaggcaagagggcaagtccgagttgcccagcaagggaaaatgctgagctagggcagtcgctgtgctgacagagaggtgggagggaacttgagagctgcaggagcttggaagcctgatgagctgagggggccagcatgtgggcatgccgcctggggtggcataagcgaggcaggcagcaagggctggaggagcatctccctcttaggggctctacagctttgggaatctccctgtggcctctgccacaatgcagcacccactcacccatggtctgggatgggtgcccacagctgcaggtaatcctaaaagactgcaagcccaagccctcctcactctgtagagtagcactcggtacagggcctgggcagatgctgggcaaagaagcacattaggcagggcagagcctcacaccgagaggtcctcattccttgctatagggacctggacttgaatcaggaggttattaaggttgaagataaaggtgcccatcacagccttattgatcagcgaggcagttatccagcatctcccaagtgtcagccttgtgattttaaaaaagagaaacaacataattagagcccataaagagacagaagcaaatatatttcattatgattataatacagggtgaatcaggcgaccatggatacagcgccaggagagctacatgcagagctgacacttgagctgggctttgaaagatgaataggagttcgccatgctgagaaagagggctagggccccagaggcccaggaaagagcatggcctaaagcattgaggcatgaaagtgtctagaagagaccagaactaatactgcaacgtcttatttaccccacaatgtgtaccgtatcccctcaggctaccccacctctgagctcacctgcagcttagagcatctgaaagagcccagacttgagctgacagcatcccacctccataagaaccagggactttttactttctgccccaggacattctctgaagctgagaggcctgctctgccctcccaaaagcatagccctgaagtgcaagaaggtaatgccctcgggtcagccctcaaacaatggggaagaggagggtggataaacacccgctaggctgacaggcaattctgtatctgatccacgggtctctggggaactgagcctcactcctctggatgcctcctgcagtgaccctgagaatacacctttttcttttttttttttttcctctgagacttggtctgtcactcaggctggagtgcagtggcgcgatctcagctcactgcaacctccgcctcccaagttcaagcaattctcctgcctcagcctcctgagtagctgggattacaggtgcccaccaccgcgtctggctaattttggtatgtttagtagaaatgggggtttcaccctcttggccaggctggtctcgaactcctgaccttgtgatctgcccccccccccctcggcctcccaaagtgctgggattacaggtgtgagccaacgcgcccagtgagaatacacctttatactggtgtattcacctttgctccttctcaaccgcactactccccacctccactgccccaatcttccactcctgtgatcaccttccaattaaatcacctgcatccaacacctctctcaggctttgctttggaggaaacccaaactaagatgggctatgttactggagacccaggatgagtagtgttgtggtgttaacaatcgcacatataaaatgcatgtattggctgggtgtggtggctcacacctgtaatcccaacactttgggaggccgaggcgggcaggtcacaaggtcaggagttcgagaccagcctggccaacatagtgaaaccccatctctactaaaaatacaaaaattagtcaggtggggtggcgggcacctgtagtcccagctactcaggaggtggaggtgggagaatcgcttgaacccgagaggcagaagttgcagtgagccaagaccacgccattgcacttcagcctgggtgacagagtgagactacgtcgcaaaaaaaaaaaaaaaaaaaaaaaaaagaaagaaagaaagaaaatgcatgtatttctcagtatctcctacatgcagaggccgtgactgggcacaaggggatgtggcattgtctgagtttgcccttgcttttctagacctcccttctgcctggggagatgtgacagaagaggtgagccagcagcacaggagggatcagaaacattttccttctgcctttggagaacatcacatgggttgggggcagcagattgatgttcctaattacatttggctcaagctgctattaagtacttgtctcattctcagagcccacaacaacggcggatggcgggaaaggtgccaagaggcatgctgggagctcaggatgacaatctgggatttgaaatctctgtaagatataaaagtggacagacaagtcacagccatgggtgcagggtgactggtgtccttgagttgccctttaaaggtttccgatggggtcctagggctggaagggccctggaaaggtcttgagctccatccttctggctagaggctgacctgcccaagacagctgagacagggaatctgactcttccaatgctggacagctcgctggtgggaaatgctttcatgggcctaatttaaatttcctctgctgcaggttaaaggtatattttgcttgatttgttcttggtggcattaaatatttgctaagctcctactatgtgcccaggggtacacagtgagagaaggcatgcctctgtgctcagaggctcatgaaaatgagaccagaccctcagaactaaatgcaacagggagagccattgggctggagttgtcaggagaggtggcaaggaggtggtgccgtgagaggtgggatgcgtttgagttagtgcagaagaataagagagcattcctggcaggcaagcaacgtgggaagatgccttaggaagggttttgcacagaggagacgcctgaggtctgcagcacatctgctacccaagagatttagtaagtccctggaactcccctggggaacgaatagctgcctacctatgtcctaagacacctgtgaaactcaaataaggcagcaagtaggaatggaccctggagttcacggattcaaagcacaatgctgagcttgatttaagaagactttcattcaagtcctcgctctgtcactgtgtgctcttgggcaattcccttcccttctctaaatccgtttactcatcagcaaaatggggacggtaattctttcctcacactgttgcatttaggactcccaagaaaatgtggttaaaaatggcagggccgggggcggttgctcatgtctgtaatcccagcactttgggaggccgaggcgggtggatcacgaggtcaggagttcgagaccagcctggccaatacggtgaaaccccgtctctaataaaaataaaaaattagccgggcgtggtagcgcgttcctgtagtcccagatcctcggggggctgaggcagaagaatcgcttgaatccaggaggcggaggttgcagtgagccgagatcgcgccactgcactccagcctgggcgacagagtgagactactccggtctcaaaaaaaaaaaaaaaaaaaattgcacaatgacccacaaagcacttcctggaggctggttactctattattattgctccaatctagacactggtctcccggaaggcaggcatcccatctcctctctgttcccccagcactttccacagagcaggtgctcatatatgacgttgccttcgctgtccaggtgaattgcaccggtaattaccgtggagcaggaagccagcacttccgggcttgccaggctgtcctgcttggagaacccctctgcttccacctctgctaactcctcccctccaccctctccgcggttctgtatctgcggaaaccggttctgctcaggtgcttgggagggagactcctttctcaagacttgcgaggtcaccttcaggtgactgtccctcaaatctccgcagcagctccaggacacactgtgccccgagtcaggattggatcaacacacaggacgcacctgtgttatcactccaccagtagagcggcactcagtggtagtgtagacagtcctagggcagggcagcttctataacaagaggttccttagggagctagcggccgagtggaaagagcgggaggaacggctcgggcaggcaggtcctgtgctgtggtctaagtcacttcccacgtccgtcccactctgatcgtcagtttcctcctctgcaaaactcactaaggcggccttcgggcaagtcatcgcggcgggaattagattcgaaagagtgcttacacaaatccgtctggccaccctgtgccccgggccagcgcgaggtgggggtgcgggcagggctcccgggcttgcggctgccacgcccctcccagcccgccgcgccacactcacggcccacgggccgactttgcgagcctccagggggcgaacccgaccgccttctttgcccgcgcagcgcctcggccgtccagcctgtgacttcaccagcgtccccgggccagcgggacacccgagagcccggggcgccgcccgttctcccagccggcaggtgccgggagccagcctcgcccagccgcgtggcgtccgcaggcccgaaggggttaaggccgcggacccgggcgcccgtccggactccgggagcagcggtgcccggcggccggcgatcgagcgggaggctcggggcacggccgctggcgggctgcgcttcctcctcctcctccctccgcctcctcctttgtagcgagttcccggcccctcttcctccccccgccccccagcccgggccctctccctctctccctttcttcctgcctcgccttcctgcggcgaaggaggctcatctattataaatgcacattcggggctgacatcagcgacgagcggcgggcgagcgccgacgagcggtccctgcgcgctgcccgcccggagcgcagcccccaggctcggccgagccgccggcggggcgcggggagcgagccgggagctgccggacccccttccgccgccgccccgggccgccgccgccgcccccgcacgccgcgcccgcgcccccgctccgccgcggagtttctgcatgactgtcacaaaggtaagcgccgctcgcccgccgcgcccgggacccgccggcgcctgcatcccccgggctaggctgcggggggcgcgggggtgtgggtgtggggagggggcgccggtgccgggaaggtgcggcgcgcgcctctcttgctgccggatccgctcgagtcactccggcccccaaggactgcggaggccagggggaggatgccgctctggcagccccggcggtttggccaacatccctccgcgcccggcccaaccccgggactgcatttttaacccttgtttgggatgctgcatttttaacccctggagagctgggctgggcggctagcggtgtccctccagggagtgcgcggcgggaagcgtcgctggcaggggctggtgctgagcagtgggtgtggggatgggcctgccgccccgaggaggccagcggaggggaaaccccaccccacctgccagcctctgccgcccatgccgggagcgctggctccactccaaagccactctgtgcagaaggcgctgcccagtcccgggagccgctaccagagacagggcaggtccaggtggttggcttgaagatgtggggagggaatgtgacaggggaagcaaaggtgggcatcttggcagcccccatattggaggatgattgttgggccttgtcataggggcccacgtttattggagagacttcaggggcttcctagttgtagggaggaaagagttaagaggaaagatgatggggcagtggaaagtgccagggtcaagggaccagggagacctgagttcaatcccagctctatcccagatcccctggatgaccttggtcggggaggggtccactttgggcctcagtttcttcttgtgtgctgtgagggtgataatatgggtcctgggttgtgacaggctgttaaagaaccaataacatcaagggtgtgaacccacactcttcagagagatctgtctgggtactgagctcacagtctggcggtggcctcgggcttggccgtccattcaagggccagactccaccctttccagctgcccagctgggtcccagaattggggagctggaggccaaagtgggaccggcagcccagagtggggtcagatggagggtcagagcagtggggccagatggagggttggggtgcaagtgatggaggtggggtggttttggctccttctggtaagccagggcctacccttgccctcctgaggtctgccccaagactgaatgtttgtgcggattcttgggcccaactccaaactttgccattggccctggttctgggacttgggagcattgtgagaagatgaacttgagggtgcaggggcttcctcagctctggctacttctggcagggctgttgtggcccacctggggtaagatgcttagggttttgaaatgatgcaaatgctattcagctgggagggatattaaggttattaatgtcaaagatgcaagcaggctgggacagaggagtaatggatgggcccggctagagagagaaagggtgtgaggttttaataatagcgctgaggattaactcagcgcctcccctgtgtctctttttgtgcgcgagctcatgcagccttccttccctggaggcctgcaaggaaggtgtgttcagttctctttaacagtggaaggaactgaggctcagagaggtgaaatgacttgcctgaggtcacacagcatgtatgtggcagagctggggtttgccctcaagtctgtctcaatctatggccagtgatctttgcactgctctgcatcgttgggcatcctggctactgggggacttccatggtagaggagcactgcttggagacctgaaccttgaagcagggatgggacagggagtccatgaaagtgggtgcttacctgttaagcccactggcaggcctagcttcttggtatccagtaactattcaacactcctccacccccatacccagcccccaacaaaccctccatgtcgctcacctcctgctctaaccaatgtggctttggcttaagcaagctcaggggattaaataaaatccccaccttaaccctatcttctctccccttgctggcccttcacagaccagcgtgttcttgtggggaacagagagcaagagggatgcaggaaaggcactggggactgctttgctgtctacaagcccgctggtagtagctcttccagtaccatagggaaagccaccatgctctggaagtctgaaggcctggcccctagtcctaaattagccaccaacaggctgtgtgaccttggaccagtcacttccatccttgggcctctgtttttctatttgtcaaatgtaagacttggttccaatgatctctagggcctcttctgctgagccttggtgcagcttcagttctggcaagaaagtcacctctgatggagattgggagactctttgttctctgaggggtggtctgtttacaagacagatatgaaggagaaccctaaagagggtgtgagaggtaggatcgctgctgacacactgggagcggtaggtaggggaggaaatgggttcgagagtgagctcccagggcagtgtctagggctctagccttctctgctgctgcttctccaggcagagggtcatggctgggtcccaacttcctgccccttggacgaatgccttagtccttgtatcaggtcccctcagggcagagtcctctgggccagggttaggtatggactgcaggagctctgagctcagagaggcctggcaagtggagaagaggaaagcagatggcaagttgctagatcctcagtagcacttctgtagaggaggtgagcctgttttccattttccgcctctctttcatacatccccttgcccccttaaccatgaggcacagctgctaaagctgccggcaaaccctgtggtttctgaaggactcctgccctaactagccttaggaacacagagccccggagaacttctagccccgtggcatttctcctggctatgttttaaactttatttgattgtatgtaatttagtaagttaccttactttctttataggatgagaaagagaagaaagccagaaaaagggaagaaagagtggagggaaggaaggctctgatgcagggccctgagcatgcacaggaggtcaaggtgctgcctcctctcagtccaacgtgcttcctagggcagctcggggcgagggagccaaggctgctttccctgagacgagtagctccagctgattttattcttcaggttcttctgactgctttgtataattttcttgttctgttccatctcagtcatgtaccagactagcagtgcttctccagttctaaatatctgtttctacattgctatcaactggaaaagcagaggacaaggtacattaatagagtcgtgtgtaaagtacaagttaatgggctataagaaaacctgtgagctaaagtctaggcccttgcaacccgctttgtactgctcagaggccctttagggtgatttcctggctgctggctgtgatgtgacccagaggtgggtcttccaggtaagggaggaggtggcttatagtgaccaggctcccctattttgaggtgtgctgtgttaagttagacgctagtgagctgaatgctttttaccttcctgagcctggctcaggggggtcagcggtccaggagcaaagtaccctgagcagcacaattgcctgctgcaccttagaaggccttaggagagggagtgtgggaaaagagaagacctttcatgccaacatgctcctccctgctaagcagatagattgtaggtccgtgggcagcacgatcaactgtgccctggcccctctttctgcaggcagccttccctctcctgcctcagctccagcagggcacagcctgctgataagagccagtggctcctgctgaatgtgaaaggactgaggatgatgttatcctgcccaggtaatagcaggcctgcattttccaaagatcatgtgtctctagggcccctacagagtcacccataggagaataaaattttggagcgggcaaatcacccaaccctttcccttgagaaatgagggaactgagacgctgggagcagaagttgtaacttgcccaaagtcattcagtaagtttgaggctggaggggctggcacctcggtcctgactcatggtcagtgctctttccacccggctgccctggcaaggggtcctggggcattctgagcaggcacaaatgttttggccccactccacttaccccactgcatcgccccttcctgtcctgctggtgcctggatttccctctgtgggacaccatctgccctagatggaagaagcattgcgggagtgggaggagggacaggatgtggggcaggggagcaaagtccataggagccttgctatacctacagtcagatggcgagggggattatgaggcccctctgcctccagttccctgacgcagaatctaggtacccaggagatacctgaacctccagacattctacatcccagcacctcgttcctgtctgggtctccctgggagaggaagtaagagagccagcacctcaggaagccttggtgaagaggaagcgggggtaccagcacagacccagctcccgggtgggagcccacttgcgggtgggcaagggctctgcctgctctgcccacacacccattatgcctcctctcccttcccggccttcttccagatatccagcattctcatgctgggaggtgtgcggctagcagtcattcgttcatttagccagcaccctctgagcacctactctgggccaggccctgtgtgaggcattaggaaaacagtggcattagccacagtccctgggatccaggaccttagaggagaaggacatggaaaggccaaagccttgagttcagagtctcgaggtccagtgggcatgagccaggagacctcttgccttgcctgcatactgtaagtgcctaatgaatgcaggctctttccttccttactgtctctccctctaggcaatgaagctcactctccagaaaagcgctgtcaggtgctttcttctggactgtgcccagaggccctgtgttcccctcccccgaggcactgccaccttgacacctatggcagttcttagaggaagctgggaagggtttgaggctctccagggctcccagaatcaccccacagtggccagccctgtgaggttggcacacacttgagtttggctggttgggagtgtgggcgctggctgggccaatgtcctggcagctcagggatggagtgagtttttccacttctctcccaggccagctagctgaagcagacacagcctccgccagggccagggctggtggagtctcggctcctggcacccgggcagccctgactctgatttggatatgcctggccacagagcttatctggtgtccaggagatgagaacgtgtgcagattctctctgcgcccagccctgtctccttccctcttttcctgatcagccccattgggttcccattccttcccctgtaggccctgcaggctcaggcccagggtcctggagcaccctgcagcctggggagcttggggcagctggcatggggcaggccttgccagggaaggacagatgcaaatccagtggcttccacatgaaaagtagctgtttagaatgagcctctcctttgtgggcctggagtgcgggaccagctgctaaggaggcacaagtggggtgggggtggggagtgggggagaagccaccaccgcccttcctcatccctcctttttgcccccgcagaggcccctggagggactttgtaattggtttctggctggcaacctccttccaattaattaatgtagcaatgggaggctcccaggtttgctcaggctgtctttcgtacagaatacatacatgggttacttccctgaatcccatcagctctgtcatggtggggacggtcccctctatttagggacggataaacagagtgtctgagtggagagatgaccacaccctggtcccagagctaatgtgggtcagaggcgggatgcacgcccagatcttctggctttgagccagaaccttttcaatccgatcacataatggtccacaacccatgaagattaatcaccatcatcatgataataacagttattaagcaggcgttgggcacgcatgatcgcatttactctgtacaaccatggggtagattctattatccatcccattttctagaggaggagagtgaggcttagtgagagtaggtgaacggctcaaggtcacaggttgaatgaatgggtggggagcagggatttgtacctgggctgtctgactccagagaacactttcatctcacttccaggcctttggtcctggggcatgatcgtactctgcttccactccccaccaaccccccacctacaacacagtgggctattgtctgttgtgtttgtggccctgccactgaggatgtgcaggacaaatgctggttgccttgagggtgatgcccatggttgtgtcctgcttagatttgcctgtggtctttactggagctaggagtcatgtaaatgattcggggaagggtgctgggggaggagggtgtcctatacatggtgtttgacatcagattgggctgcttgggtagggcattcagccgagggcagaacaaagtatgacagaggcagagccgccttctccatttccatgaggctagcttggttcagagaacgcaggtccctggtccaggcctgcagcccttacgaagcagccttttctcgagttagcccctgatgatttggggttccactggctaggaatgctggctttgaagtcaaacacatggcagtctgtcatttacttgctgtgtattcttgggcaagttgcctcacctctctgaacatctgtttcctcatccattcattgggattgataatagtaacaatcctttactattaaggattgttattaagataaagtgagccgatccatgtgaagcacttaccatatgcctgacatgtagtgttagctgttattctcaggaagacagaaaattaatgagtgtcctggggcttatgaaatgagcagtacagggaactctgggaatagcagggggcctgacctagtcagagggatgaggaagtgactttaagttgagtcatgaaggatgagtaggaggtagcaggtgaaaggaggggagctgaggagggagcaacaggccggggatgaatgggcaaacgtcaggagtcaaaagccacggaccttgatcacttcctgcatgctggacattgatgagagcatggtacaagtatccactcatttaatcctcagagtgacatcatggcataggttactgttatcatccctgctttacagataaggacacaggcacagagaagctaagtcacctgtaaaaggtggcccagtgaggcaggatgaggctggtccagacccggacctccggattctggcctctttccttcccgctgcctgctgcttggtgatagggagggtggcctgaccctggctgcttctaaaactgacccaggcaagggggtgtggaagtgccaagttcagttgcctaccccgatgcctcacggagcctccttgggctgtgtaaagtggccagaggccctcctggctctcaggcaggagggagaagtcatttatttttccaaaaggaaactttgctctggcaggaaattttccaccttatatttttagtgggctcaattatgaccatttttgttctttaaatctttcttattatctatattgggccttggtctttaaagtcaaactatagggagatatgtacacacacacacacacacacacacacacacacacacacaatttttttctaaagtgttaaaagtccacaccaatagtcccagctactcaggaggctgaggcaggagatcatcctgggcaacgtagtgagaccccatctctaaaacaaacaaacaaaaaaaaccccctaagtgtctgcagtttggtgtctgctctgtccgagctcagagaaggtggatgttttacatggtgttcatgccacaggcttaaacttactgtcccctgtatgagataagtgtcaacacccctggaggctctggctgcccagagcggtggtgtgtggaggctcaccctgggtaggtgctcatgctaattgctgggaagcctccatgatcagtatttaactccggagatgtctgaggtcatctgggccagcactctgcctgtacggcactctacactttttaggaatatcacaatgattcctaattttaatttagattcgtttaagaaataccaatttaatagtagtcagttctcagcctttcaccaggtgctaggcccctgctttcaagggaccaacagacaataacaataacaataataatagaagcggctaacccttccggagcacttagtttatgccaagcatatacaatatgttttatatgtattaattcatttaagcttcatgacagcctatgaagtctgtgctattattatccccctttctatggttgcagaaatggaggtccagggaaggaagggaggtaacttttacagtgttcccacagccagtcagggactcagcctgcctcgcaggccttctgtcttgccactttgtcaggctggtgggaatgacccggaaatatgtggtccagagcatgggacctggaggcagaagacccaggcctcgctcttgcctctgctccttactgtgtgaccttgggctagtccctggatgtctctgagcgtctgtgaaaatgaagttagtagtctatctctgtagggtgctctaatatttaagtaacatggaaagatgtaaataaggtgctttgtagatgtcatggcaggaaatggtttattgtgatgtctaatctgtgcccactcctttcctcttcctcaccagtatttcaaggccctcagatttaggcagttccttccaatagctagcccacttctcccctgctgtagtccttatttcagaattgattcatactctgtgggtggaagagaaaagttcatctcttccaaacagcctctatctgtttttactctgtcaggctagtttggtgcagatgaaaagttgcttttctctcttcctgttctgtctattttggctgttttaatatgcttgggacaaataatctggctataaaaatgtggtgtcctgctttcatttgaaaagtgagccaaataaagcatccaaaccttgatctgtattatcccggctctctgtagatcagagctccctgtggaaggcgagggaaggtgggtcccagagcacagtcctacctgggtccctgggcagaaagaccaggttcccactgtcaaatgaccttgatctttgctccagatacctcccgatgcccccagcgctcagacctgcttttcctttaggtttatggaaaggaatagcctctactagcttgaggcatttgcagcaaatcatttaaacaccttgagtttgatttcagaactaacagttttataatctggaatctggtagaatccaggacgtggaacggctgatggaaagaaaggtgttggtggaaggggacaaagggatttaattcctgaggatttttatttaactcctgaaaaattgctggttatgcctgccctgctgacctccaggtgaaagaccagcttgcaaaaatgcatggggaaatttgggattccgagaaatttggaattctgggaaaggggatttctgcatacctgagtggccaactgataactttatcatcacaaatctttcttctagagaccctgagtctgccttcctgccttactcattaaaagatctgggaacaaactcaagttattatggattgaggctgtttcagggcttgagctgttctgttaaactgaccttttcagggttcggatccacattaatttctcaatccttggagttcctgtagcatgtgatccctggtataccagccagcaggtaaaggcctaatgtgccttgtttgctgattatcttatgagcatgatctttggctccctaacttgtgagcttgctgaagctagagattaggtctgattctttttagtagctttcacagcattcatcaaagggctatgcatgccagttagagtgtgttgtggatttttcgaataccaggtatagacatataagatttggcaggatttggagcaaacctaaaacattccctgttgctgcttggacaaaatctctactgttagagatctgtggactgctacagccggaagggactttaaagatgtacagtagaaacgcccattttgcagaggagaaaactaaagccctagaaagttttcccaagggggtataggaaagatgtggctgagtgggaactggggctcccccaagttactgctcaggttgggttttccaattctgtgggtttttttctaggcttctagtagttgcccgatgttggcaggccaaggactgattcaaaagtggggaatgggagaaagttccagaaaggagactttgagaacttaacctagatgggaggaggcacctggttggagagacttggctccccaagtgaccaactaggagcgccctgaccagaggcctggtttggcagtggcagaggcagagggagcaacttcggagccctttctgctcaaccatcaggctgcggctgcccaggcctggcagtgcatgccctacatgcctggctgcccccctggcctccacagtggcccgtgacccccggctctccctcctggaagctggccgtcctggcacactgggctgccagcaatctttccctcctttgtttctctgaaaccatgagaagggccgctgagttgggagcctgggttgctaagagctttcctcaggccagaccatatcaccagcttgagaagtctcctggccaagatttccctggaactctggctcagagggagggagagtgggtggagggaaggggagagggtactcaggagccacaaacaaagctgcccctctgcaccaccgcccccctctcccaggaccagagtgtaggagcagcctgggagccacaaactcagtgggcctttgctttttgaagagccctgggaacaatggaacaacaaagctcttcggaggctgcccccccatgcccagccctgcacttctgttctctcaggtacccccataactctgctgttacccccacttttcagagggggagacagcctccgagaggatggcctgccctgcttcacacagcaggaaggggcaaactgggccataacccgctggctgcaccgccccatgcacaagcaggagctgcaggccagctggcctggcagtggatggctgagggtgctgcggggccgctggtttagaaggtcctcccctaccacttcgcttagaacccactatagaattcccttcctttgggtcttttaggtgttcttaaaaatacaagtccccctgagggggtaataatgccctaagtggttgtcattgactggaccgagcctgctggaaggaaaacactagagtaggtgcaggaggggttcctgagaggcaaatgaggcaggagggagagctggttactgtaagtgagccagttttgccagggaagtgagtgtggagaggagaggacagccaagcttattctgtgttcctctccaccctggctgccctgttctcctatgcagggccggccgccttccccatccctacccttgtgcaaataaaacgaggactgagatttatttaaaaaaaatttgctgagccctgtatgccaggccctaagcggcattgagggtgcagggatgaaccaaagcagtctctgtctccagggggatcctggtctgtggggggacacaggctgcaggactcagaaggacacatggctgcagggatgttggggaagggaggctgatgggtggaggcgtggaacagcagtgacagggacatgtgcacagaactgtgaaactatgagagacgtggctgggcaggccaaggaagctctctggaaggagagatcttccctcagtcttccagcatgagtaggcagaggcagatgaagaggcaggaaaggcattccaggttgagcgggcagcgtgaacaaaggaatggaaggggaaacatgtttggcttattctaggagagaaccagttgggtgctgctgggctggaaatggaggggctgtatgtggctggacaggcaggcaggggccatggggagctttggatgccaagccaagaagcttgagcttcattgtgtggtgttgctgggagtcctagaggggctttaagcaaaggagtgatgtgatcccattcacactttaggtggtctgtccctacccacattgccctagaggcagagaggtgagtggacattctcaaagcctatgtgcaatgaggcggggaaggggtttctgagcccctagcccagacctcctgaaggtctctccctgtgcctgggagctgggtgtcacatatgccccaccccataccctaagatgggagtcctggcctggaccactccatggtatgggcctttcccatctgcctgggctgccagatggttcgatctaagggttgagaacataggagggggcagaggaccagaagtttccttctaggaaaacgtggttatagcatggcgagaagagcactggaatgggatttcaggagctcctgcctaaaccctagccctgaccctccctggctgtgtgatcttgggttggtcacttcctcctctggttggggactgcctcacctggtttgaggctgggtgcagaagtgagcttctggatgcgagtttatgccctgatgctgcccagccttgggccctgttttaccctcttcccttccccggtgtccccagactctgcagccagtgtgtctccttctgcgccgtgtcctccaaccacacatccactccagactgccaagagttgtgacaagttcatgagacttggaggttaaggaccagagtttgagtcctgccagcttgcttgcttggaggaggtctcaacctttgtgttcattgtcatacatgtggtgtaaattccagcccttagcacacataagggaattttctgagtcagcgtctttcatgtctcttggatataccccacctgtgcttgttctgtctatttcattgggagagccctcatctgatggaattctatatccagtttttagtggttacctggggtggggataggggtagagtattaactgagatagggtatgagagaaacttctggagtgatggcggttacatgaatgcatacatgtataaaaatctgtcaaggcaaacacttaagatttgtgcactgtaggcatgttatatatattttacatctcaattaaaaataaataaatgaaaaaagattcttcccagctttctggttcaagtcccacctctctgcatctattcatatattcattcactctataaatatttgtttgtgctccagccagcccaggcatacagagatggagaggctggtctgtgtactgtacagtatgtacggaatgtacagtattctggtctgtgtactgtcatgggagctcagaagcacagaaccttcagggctcatggggatattgaccatggaggtggttctcaaccccggctgcaaatcacctggtgaggtttaaatgcctgtttccagcttcatgtatgttttagtccattttctgcttctgtaacagaataccgcagactgggtagtttataaagaacagaagtttatttggctcatggttctagagactaagaagtccaagagcatggcaccagcatctggtgagggtcatcccgtggcagaggcatcacgtcatagtgagtgtgtgagacagagagaggaaattgggccaaactcattctttcatcaggagcccactcccaggataatcacattaattaatttgtgagggcagagctctcatgacttaatcccctcttaaaggccccatctcttaatactgttacattggcaattaaatttcaacatgagttttggcagagacattcaaaccgtagccatgggtgtatgacctgttcaacatttggtttaatgttctgttgtcactgtcttgaaattcttaaaaacttttgaaaaaggggacctgcaaatgaaatagttggtcctccctgtcctccttcccccagaacaatagaatcagaatctctgagaggtgggatccaggcagtcacatttcttaaaagctgagcttccattctctagcagccaggtctgaatgtagccctactcctagacatttgctgaaacacaatctggagcctcgttctctagacacttgtgactgagctggaacaataagacttcacacatgagagtgtcacaagagcaattcctgggcaacagtgttagaaagctacaagggagctcagagaggaggggaagaagaccctctctgggtttgtttttttttttgcaactctgaaaagagctatcagtccagtttgtctgccccttgatagtatttccagaagtggatgagctgtgaagtgagtttgctctgaggtggcgaagtgggtgtaggacgcattgcaccatgcaaaggtcccattgtggggtgggaaggtcaaggaaggcttcatggaggaggtggcacatgagccatcctgacctgagaagggcgagagaagagaagagaagaggagaaaaggcaaaaggacaaatgcatttaagaaggggaagggctcatttgggggaaagggaggaactaggctaactggagtatgacttgagcagagagagatgtggttgggtggcacaggaaatgatagtctgaagtcagaatcccgtcagcaatggggagctgttgagtgttctggatccaagaataatgtgctccataaatgtctgaacgaataaacaaaaggggtgtttgggggagacataaaggggattggccctctaaatcgctgaggtttgcagccagaactctggtccacctggcatggaaggctctgcaccctcttccccataggtggtgcctgtctgtgcaggaacctggtgtcccctgcagtatggtccaggggcagcagtgactgaagcatccccaagaatagcagacatggaacagaccatttcctcccatttctaggaacagcaagctgtgggtggatgggtaggtggaggcgcttttggtacaagctgagctgtgctctccagctctcaccaggttccccagcccaggtgagcagccctggcaggaaggtgctatcttgtatctcccatggcctggtgaacactaattccttgggcagggtggtccctgcttggaatagaggagccccgatttctgaataaccagcagcagatctaaagcagttctgtttgtttctgtctcctgaaatatttatgcaggaatatgagaaaggggctctgtttattgaactcatcctccagggcagaagccgtggggaaagagccacttcccatgtctgcgagccaatgagcagaggtggaatttctttgggtttgaagtgagacagagcctgtgtgcttgcagaaggaagtggggtgggattcctggagaggacagaaagccctttcaacctcttgcctccagtcccaggaaagcttttcagcacatactttcctggcgaatccaaataataacaattgaaatctcagccttggttctactctgggctttgcctctatcatgctgtgtgaccttaggcaagttgttaacctctctggattgtttttttccaattctgaaaagagtgaactatcagtccagttctagctgtccgtgcagttctagctatcagtccagttctgtctgccccttgatagtattttaagagtcagttgagttgtgcagtgaagtggatttaggaagcattgtaccatgcaaagtcccaactctgcagcattcgaggccagagaactggctgagtggccagccaagtggcagcctcagctgtgacttgtggggtcaggccagagagagtactctcttgagctggaccctaccctgcctcaggttgggacaaaggggccccctccctctttcctcctccagctaagccctgctgtcctgtgtccctgagaacactggcaggatttcctcccaggaaaggggacatggatgtccagtttacatccctgggagttgcagacaccagagaagcaaggcagcacttccccatgacagtgggatacgccttatcgtcagatatagaagcctgtggctccaggccctgagccatgcagcagggctcagatatccgctgtcctcctttaggggactgggatccccttccctcagttcagccccttgggcagggcttcaggggcttctcccaggggtgggttctgttctcagctctgtgactggcttggtcttcctgtttcccatggtggacttcatgagtggtaaagttaataacagttattatcactagaccaatccaaatcttaatacaaaataccatcaattaagcacctgctccatgccaggctctgtactggctcagtggacacacagaggggaccaatttccccagcctttaaggaagttgaattctgcctgggaggcagacgggcaaacaaatacggatgaagccattggctcagcattgaatgcgagtcctaaaggccgagggaccctggtgagacggagcgggcgtctgggaggaggaggtgttggagtgtggctctgaacctaggtgagggaaggagcagcgtgagcagaggccagggcagcgacgccgtggggtgctcccgagccacgagggtgcccagtgaggtttgagtgtggagggtcgggggctgggaaggtgatgagggctcaggggtggcttgcggggaggtgggagttgtgcaggagtgctgttcctgggcccatgtgtatcagtccatccatgaagagccttttagtagtaaagagatgcgacgaagtcattagattccacaacaataaatcttcattaagcatgcactgtgcccgtgaccctaggtgatgggacagtccacatgggtgaataaaacaggaacagtccctgccctcagggacaggcccaggaggatggggagacaggacagaacacaatcctgacatcagtggtagaaatgctgttaaagaaaatacaggggcatggggggtagggggtgggggttgtgagaaggggatcccctgtggaatgaaggggggatagagccccatgggatctagggggatctttctggctgagagagaagcaattttgaggctccagcaggagcctgcctgccacggaaagcacagtgagcaggcctggtctggtgggaaaggagattgaaggggaaggtgggttctggctcccataaggctggcctgtgctagctgctcactaatacttctcgactgactgggaggacagataggtgaaggataaggctggaggcctggagcccagcagccatgttgaggtgatgaggatggagccagggcagaggcagcaggcacagggaagatgcatcttcaggccttggggatggtgtgggaggagaggggtacaacacagcaggcagagtcttcccggagctcctgggagaagatccagatccacaaacccacggggagaaatggccgcgcatcacgcagagcactccccacgccccttcccacaggccaccccagccactctggcctcctgacctggggcccatggagcccatcctgtggctctcctcctgcctgccttctggagggtgctccaaactgggtcttgtcctcctgcagggccagcagggctccgcagaagtcctcagggaccgccctcccctgccagcctcacctcgagtccaacctcattagtattttgagcagaagcatatatatctttttttttttttcctgcagggaattggtggcctgctcatttcaaattgcgtaaaaccaaagagcaattaagaggcacagccttctcgggtcaaggagaaatgacagagagaggtggctttgctcgcctggctgctggcacatcttttccaggctggcctggttttggggtgacagggaggggagatgctgtgggattttaattcaccagcaacaaaatactaacgagtaggacagaatcactaatgcttattcagcgcttaccatgttccaggggcagtcctaattgttttacacgcacctcatatcaccctttcaatacctaggaagcacagggagatggcttctactgttatgcccattctgtgaaactgaggctccaaggggttaagcagcatgccccaggtcacacaacggaaatggaaccagggttctattgcatccccattgtgccccagggcccatgctgttaactgcctggctgtttggcctctcaaaagcattgcatttagccaatcacttctccctaatttctgtttcccccccatcaaaaaaaaaaaaataaataaataaaaaataaaaaagaccaaacgaacaaaatcctccattgctatggagctcagaggcttcaccagggttactgtggtgaacaagggcagagaggaacctcgggcaaaagtccagcctgcggttcccatccttgtccctctcccagtggcctgcacagttagacccattgctcttggctggtgtggaggcatctgacccattagggggccactgtggtggtccaggcgagaggcctgagctgaccagggggatccagtgaggactgagaggagggcaggatgcagggtgacgttttggaagttgatgagtctgtgggggtgggtatgagttagaagtcagtggagaaccatggccacacagtcaagagtgatggagaacccaggagaaagaggtggcgctgatttctccaccttttcttcagatccagaccccctccaccacctggatcatccaccttgttccatagacttggctctgagagcattttcactgtttcagagaatcggatcccagaggctgaagctcagtgccctgggctctgtaggcagcccctggagaagagggcgggcagtctggctggaattggggtgtcccggctctcagggaactgagctggttcctggcccaggccatgtgggttttaggattttagcattgctaaaccctcctagaactgctgtgtgtgtgcacgtaagcgtgtgctttggtagggggtggagataaatgggaagttctgctgtctctgcttctctattttgcgtggtcagtgatttttactaatagtaaccttctggggaaaaaatgatccaagggcagcagtccaattttctctagagagtaggcctgctttctaaaaaaggactcaacctgagagaagccagaaggagttcacaccctagactagagaagccagtccctggtgagcaccagcatgcctgtctccagactccattcctgccctggagcccgcttggccttgaacgcccctctgcagcagcgtactctccccagctcctcactttggagttttaattctaccgcaaacctagctctcctctgtgccttcccatctctttgctgggcaccaaggagctgatctgctaactggactttgtttagaaatctgggggtttgtacagaaacgctgccaaaagaaagtttctgttctgtccagactctcctgaggcctggaagagtgactctgcttgcgggaagctggtggggatgggagctggggcagccatgctgtgagtctgtcctgggaacaggcccaagctgggtctggagctggtctggactaggagagtgaggctaggggttaggggatccaccagcctgtattcctagagcctgtcgccccatcctttggctcggccctgcccaaaccacttggctgggcattcaaagccttcactctctggccaccatttacctccttggcccctgcccaaaccagacactggtcggcttgctgcccccaaactcaacctctgcttttctgctccctctctacttgaaaagtctgattcctgctttcaaagcccaaagtgcgacctcctccacagagccttctctgatctctccttgctccaaactctatccttctcatgccactgctctgatgagatagttatatctgaacatgtcttgtctctcctgccagagggcaagccccatgccctgagtgggagggagcgtgtcgcgccacagatcccattgggtgctcctgctgtgcctggccctatagatgttcaattacaggtttttgaatgatgtatttatattttttgcatggatataagaatctattctgtgcatgcgtcatagcttcagccatataagatgcattcgttggcaaattcatcagagggagcagaataaagccacccaactctgtccccacaagggcctgagacggatatagggagcttattcttcctttcttcaattgccccacccccacgctgcccagacagatctgggttgcccttgaggaattctaaaggagggaatgcactctccactgcccctcagaccttccacccaagagaggcagtgccctggtgacctcatgacagtagtgtgccctccccaggctctcccctcccctgggaggctgccacatgctttccggacatccgggtctcattatgctgtgactcaaaaattaatcttgtctaattgtgctcgaggcctgagtgaattcagggactattagccaggctctgtgggcctggggtctccatggcaacgaggatgcatcataatgaactgcgtccttggagactggctaggaggcatgcccctcccaccccttggtgtggactgctgctgctgtccctgctgcttggggtaggccccctccagaggggacctggggctggcagagggagtagagacagtttctgtgtgtagcctccagtctgtctcagtgcttcagggataaaagatacttgcagatggatgatcccacagccttattgttggctgaagatttcttcaacaaacaaacaagcctccatctaaaaaccacacacacagcacatcaaattccaatagcctaagtgctgttgttttgcaaatctttctaaaatgtgaaaattgcactcctccgtggaggcctggctccagtgtcacctcctccaggaagccttcctcaatgtttgcatctttcccagccccattctgccactgtgcttggtttgtgagccagggacatttttcagcacaatctgccaaggagtggacttccctgagtacacactatgctcccttcccaccagcagacaagctcctccagcatggataaccaccgctgccctcctctctggggtcctagacctgggtacctgtaggacttagtcggaaagacaaagcggtctttgttaacagcctctctctgaactccgtcccacccccggacccaggctggggggtcttttctgtggatgtggcttttggggccttcagatacccttgtgcccactatgaccatgggtgccgaccagtgggcagacactttgccttccctatctaaggaagagggaatgccctaaaaccaggcctttggggaagatgtggagaagaaaaggacatttgaggaaatgaaaacagtaaatgggacagccctggcccagcctccagcttcctggcccttgagcccctcagtctggtcccccacggggagacaagaagcgtgggaggaaggtgaggagggagagatgcaaacccagcaatttccccacaaccacaacaccaccttcccggctgtcctgctgattctcggtttctagaaatgaccggagagagaggaatgagtagggaggaggctgcctgtctgacttttaattaaaagggagaggacacctcctagccagcctttaaggcaggggcactcctgtggtgtgtgtgcctccctcgatggggatggggtggcatgcaggttttgtgggtgtgtgaatggttgacaggtagaggtagccattggaaaagctgtccagaaagccgcattctctcctcgctcctccacaccctctccccttagtgcagcaaacgtttcttgaacatttcttggcttgagtgccaagctctgtgccaggccctgggatgtagagatggttgagatactgccgctgggctccagggcggcaggcggggacaggatggggttggcagcactgggaggttgagggttccacccgtccctgggcctcattcagccagcatcctctgagcgttgtcaggtgctgtgcctttcggtaggcaccgaggataaaacggtaagtgtggcagaggcctcagcctgcacggagcttacagtcaagagtggtgtgaggtggggattgcggccatgagcgtgcagtgcgaggagggctaggatgagggtgcctgtgggggcctggaggagcagcagccacacagtgtcggggcatcagaaggcctgccccaggggtggcctggaagcagagatgtgaaggaagaggaggatttggccaagagaacagctaggaagcgtggctgaggtcaagggaatggctgtgtgtgcgaaggccggagaagaaatgagggctttgaggagcagaaagaagttgagtgcagctggggcttagtggtgctggggcagggcccaggcctgggagggctattgtcttagtccctctgtgctgctgtaataaaacacctgagccatttataaagaacagaaattgatttctcatagccgtggagcctgggaagtccaagatcaagtcatcagcaagttcttttgtttggcaagagctgcatcctccagagggggaggatcactgtgtcccagcatggcggaaggcagaaggcagaaggccaaacacgatgggaaggcttttttttttttttttttaaataaatgccttaatcccattcaccagggaggagccctcatggcctaatcacctctgaaaggatctgcctcgaatactatcacattggcaccgtctgagttctggtggagacacattcaaatcacagcagccatcataatcccattcgcaaggaccacggacttggtcctgaagtgggagtggggggaactgctgactggctttattccggggaatgacactaggtttatgttttaaaagaccactctgacatgtatttttttgattagtagaaataattttttttaaacactcttggtgctgtggaagggaagaattgggagacaggaagggttttgccatgattgagatatttggtcctgcccaaattaggggctgatcacacacacacacacacacacacacacacacacacacacacacgttttacctacatgttgtaattcactttgatatggaaattttaggtcactaagagagagatgagcaaaaagcgctcttgctgtgtctttaaccgcctctccctatcgtgtactatgttaaacaggatccagctgtaacctccacggttcccagggctctgatcagcctggctggtgggagcccccatagctctgcctgctctggggtttcccttccgtttattgcccccccttgaggtagggatgatagatgtgaggtgtgactgccagtttcatagttctctacatcagtgaaggaggttctgtgcaatgtgcaacacccactttcttcctgagaacactaagaagcaattcctctctgttttctaataaaaatgtctcgtggaagcaagcctgtttcctgggaaaagagggactgcctgtacgaatcttgcaagcacacgtgtttccctggttgggatatatataattttgttttcttggggcagggggtggacacacagctttgcaatcccttgcctagaaacagcttccacactggcttaacaccatctgtttcccctgagcaggaaggtgtcaaagagccccctgctcaaggatgggtctgtcaacggtctgttaggataggaggtgagagacattggttgcctggggtgagagagtaagacagatggagagagaagtgggtaggttggctggaattaggatgcagaattgtccactgtgtcttacacgccatggaagtcccagggctaacacagtacgtggtcgcagtaggtgcttactaaactagttgctggatgactgtgttgtcaaacaaataaatgaattgaatgaatgaacgagtggatggatgggagggtatgcacagatgagcgaaagttggcctgtaacctccaaataattattatcttaaaaaaacacacttgctaatcatactagtgtgaggcctgagacagaggagccttcgtggaggacaaactgcagcaacagtgcgaggtcatcagcagatgtcaaggagtccatgtgtttagggcagagttagggtgacatggtgctgtgggctgaattgtatccccctaattcatatgttgaagccctaacccccagtgtgtttggagacagggcctttaaagagataattcagggtaaatgaggtcataaaggcagagccctggcccagtaggactggtgtccttataagaaaatagacaccagagagctcactctctccgcatctgcacagaggacacagcaagaagacggccgtctgcaaaccaggaagagaggcctcaccagaaaccaaccctgctggaccttgatgttggacttacagcctccagaactgtacgaaataaatatctgttgtttaagcccccagcctgtggcattctgttatggcagcctgagcaggctaatacataggggatgctggatctgagtttggagctcaaggggcagaacatggggaagagtgccatgttgtagaattcagaagggcagctggtctccttcagaggctcatactagaacatgtgcaccaggaggttcagcataagagcccaggctgtggagtcaagactgctggggtccaaattcttaccccatagaagcgttgtgagcactgagtgtatttcatacacagaaagcatttggcacagagcccggcacacagtcagcactccacaggcatgagccgcccctcgtcgttcttatcacgttcgcttgtcagtattgtcactctgggcacccccttcccttgacgcatactccagggctccagcattgctcagagtttttgggaccttcctgagagcagctctcagtagcagcttctaccatcaggaaattggttccattcttcatggtcagcccccacccccaaaccgcctttcctaccacgagcagaacaagtgtgttcctgaatgatttgggattatggctgaggagaggaaccctattaacaagggcaaagattgccatcactgaggatagccctaagaatgccttgccagtcctaagcagaatttcataccaggaaattaaaaaggtgtggttttttttttaaaaggcgactttatctcagcagcatggctagaatatgtgtgtgtcctccccagaggaccactctggaaaggctggagtcctctctatgtataagttgtgatttaaaaaaaaaaacctcccttctgtgtaaattcagccccaattcctcatcccagcattccaacaatcagaaatcacaccttctgagaacctatggaaagatgggattatgggtgcgtttgtttacatggttatacttttctgtttgcctttctagattgtgcattttttactttaataattaggagaaaattaagcaagctgttaagaagttttgaggctgggcatggtggctcacgcctgtaattccagcactttgggaggccaaggcgggctgatcacgaggtcaggagttcaagaccaatctggccaacatagtgaaaccctgtgtctactaaaaacacaaaaattagccaggcatggtggcacacacctgtaatcccagctactcaggagactgaggcaggagaatcgcttgaacctgggaggcagaggttgtggtgagctgagatcatgccactacactccagtctgggcaacagagcgagactccgtctcaaggaaaaaaaaaaaaaaagaagttttgaaaagaaaaacttcaatctcccagctgcttagcactgtcctgggtcctatggcagtgtcgtccaaagttgtataagccattatcaaagacacataaagtaaagtgggatcacccatttggagagcaatttggcaacagacaccacaagccataaaaatgtccatatcctgtgacctagtaatcccgcttctgggaacctgtccaaaggaaataatccaaaggcggggaaaaactctatgcatcaagatgctcatcacggcattatttataacaatgaaacattgggaacaaaataaaggcctaatggtatgagactggctgaataaattaggaagcattgattcaatggaatattctgcagccgttaaaaattataataccaaaatgatatggcagtgtgggaaaatattcgtgctaagtgaaaaaggtgggacataaagttttatgcatatcatgattgtaactgtgtaaaaattatttggaaagtacagatgcttcaagactggaaagtgaagggagaatggacaggacctagaagtgggctgggaggagtcacagagggctcttgggtttttttttttttttttttttttttttttgagatggagtctcgctgtgtcgcccaggcgggagtgcagtggcgcaatatctcagctcactgcaacctccacctcccgggttcaagcaattctcctgccttggcctcctgagtatctgtgattacaggcacccgccaccacactcagctaatttttgtatttttagtagagacgggggtttcaccatgttggtcaggcaggtctcaaactcctgaacttgtgattcgcccaccttgacctcccaaagtgctgggattatagcagtgagccacagcgcccggccggctcttgggttttgagggtgagcagctgggtgggtgaagcctcgtttactgaaagtcatggtggcagagaagcagattggggtggggagaagaccagtagtttagctctaccatgttaggtcaaaggtgactgcaagaatccaaaaggagggtccaatggtcaaaaaagaggcctagaccaggagtgggaattttggagccatcagcctgtagatagtgtttaaagccctaagcatgaatgacctcaggcaaagggagttagggtggtggggcttagccaagcaagcatattagaatcacctggagatccctccaggccagtgaatcatggcctctgggctgtggttgggcatcagcatttattccaagctccctggataattccagtgaatctaggactgcactcatggtccctgtgttccccagcatagggccttacatgtgggcagcatgacttatagcacatgtaagtaccgtcctgctacactgaatggtacagttgttggtcaggcgctttccttaaagtaaacattttccataccccaaattctggcacatggcctgagagaatttttgagctgcttctgagtggaagaggctgtgtagaaaatacagtttggatacagaaacattgaaaggatgaggatattttgctagctcatgggtagagtgggggcagagtatttgaaactgggacaggcacagaaaaatccagagcataactgaacacggagttatgtttcctctgatatctttggtcagcttctgatggccccagatagaggatgagtttcttgagcatggaggggtggacatggaagacattacgggacccctggagctgtttcacagggcaggcacttcgtaggtgctcaatatatcctccattgactgtggattgactcggaaccaggaaaggggcaagccagctgatcagagccttcacacccaaagctggagggcactacaagaaggagccttctccaaacatcttgagtctcccctggttttctccctggctcaccaagctcgagatagatattgggcttttgaagtaggtggaggggttagcaaggggcctcaaggattttgtgggccaggcacagaggggatagtttgtctctgttccaccatgtctggggtctctgctaggaagacctaaatgactagggtgacatctgagaatcatctggaagtgccttcacactcatgtttggtgcctggactgggatgacttgaaggctggactgggctgggactgttgactggagcatctacacatggtgtctccacatggcttgagcttcctcatggcatggccgcctcagagtagtcagatattttacatgatgacttggggctccaggagcaagtgttccaacaaacaaggaagaatgtaagatcccttatgacctagcctcagaagtcacatagggtcacttccacacccagattccactggagaggacatggaacctgcctcaaagtcttttttgtaaagagcttctttgggccaggcacggtggctcatgcctgtgatcccaacacttcaggagaccgaggtggcaggatctcttgaagccaggagtttgagaccagcctgggtgacatagcgagaacccatctctacaaaaaatttaaaaatcagccaggtgcagtgatgcgtgcttgtggtcccagctacttgggacgctgaggtgagaggattgcttgagcccagaaatttgaggttgcagtgagctaagattgtgttactacactccagcctgggtgacagagtgagaccctatctcaaaaaaaaaaaaaaaaaagatgccctcttagctctcatttttcactcctttctaagagaggtcagaccaggactccaggaacagatgccatgtgacaagaccccagggcctttatcatcttcttgtcaaaatcacatgcccttgggcatagcacctcatgaaacagggccttgggagtgaatgggagtgagggggtctacatgggctcagctgcagctgccagaccacagctttgcagaggcgtatgtcctttgacactggtgaaatgccaccaacgtgaaagaacatatcccacctttcctgctacctacctctggggcaaggtttccttcccttgcacttaggcaacccaaaccagacatggggggcctgagcacggccactgcaggcccacaggcatcctttgtgaagagctaggcaggggcccagggtggcatgatcagggcttggcctcctgtggctggctgcgcatggccagcccagacccgaacattggtggttacagtttccaggcctcctgggagaaaagccagcaaggcaagttctccctcccccacactgtggtcccctggaggacttcggcctgaaggacaactcccctggccaggccaggcagcccaagctgacccactgactggctgggagcccagccctctccctcagggagcccccatccacttcctggtattgctctgtgtgagtgtgcacgcgtgcgtgtgtgtgtgttgggggacattctgtttttcaaggacttggctctgtgcagtgaagggatctgttggagaatgatgagagacctgtgggtcagggaacatactcccctctgcttcccagttcctcctctcctagggagggaactccccatgaacaagcattcctgcatcctgaatggttggagcctcatggctttgttctccacccctcccctgcccagactcccgaatgccctttctcaggcttcccacagctggctttgaagagttatggggctccaggaggggagttgaaattccgcactctcatcctcagcatcatcattcccttccactgtgtttgctatttcagcctccatccatccgttcaacaagtgcttaccaaaactcccactgggtactaggaagagagagagaggagacagaaagagaatgaacactcaaactcagaccctatcctcaaggtgcagcagagaggaaatcaacttggaattagaagccacatgactggagaaatgctgaggccagggcccccgggtgcctgcacggtgcactgggttccaggaaggaaggagcagcattggaactgggcctccagggatggttgggatttgggttaggcagatacgcagggagagggaaaaggattgcaggtgacaagagcaacatgagcatggggcattgtggtggtggtggttggggggatggtcacctgaaagggacacatttgctgtcaagagaatttgtcctgccccattcattgttccctgtctgagcgttatctagcaaaggagaagaggatctggtgaactgagtcacaccaggctgttagtgaccatcttatttctcccagcagggcctgtatttaagaagagggctgtggctgtgcaggctttggggcagggcatcagtttgtggtccacatcaagcatctaggtgtgaggaattgagcctctgtcccagacttgggtggagaggaaaaggaagggaaatgtctgagctccagggcaggggccttccctcccgaatccacatctcttttggagttgggggagtaaatggggttttcatctcctctttgctgctggtctcccagctccttccactgccaggcctgagcccgctgtcccctccccactgctccctcactgccattcttcttccaggacatcctgtgacttaaccaaaggcatgaaagctactgatggaaggccgttgctctggctctccaggggtgagctggggtcagcccatgccctgggactggagggctgtacagcagcctgtgagccgcgtcactgactgtgatggcaggcagggtgggctggggtaggggagcacgaagcggtctggttcagtacactagcttgacctggaatccgcatgaatcatccacattggccagctagcccatccccaggggaccctgtaattgtgcaaccagcctctcccctctacccaccctccttctcttgataaaacctggccagaaactcaggcatagagagaaaatggatgcggtgacaattccatgtgttattcagaattaactaggtgaatatcgctgagctcctcttaggtagtaggcattgaacgatgcagagatctcggggaaatgggccttatcctcagggaccctgcagccctctggttccagtgtcagcagccctcactaaatgtcaatggatgcgcccagaagaggagctaggacttcataggacgagacaggttctctagcgcctcgcctcgtttacaaagcaaatggttgaaccactccctgccctgaagtgctgcacttgcctcaaggcctagtgaagggctgggggctggcttgggccctgcatgcatccttttcctgtataccccccaatttaacatctaagaccccttgctgcctggccccaggcttgtcttcctccctgatctccagacccccttgttccaggaacaacagaccccttgctctttcgctcacatcccctccctcatacatcctctctcccctcctgttctcccatccttccatcacaaagcccctcctccagcatcctgcgcgtttaaatttgtagaaacctagtcccagactagatcctatgtctgcttctatacctgagtatatgttactcccaaggcattgatgtgttgatttcacttattaaaatggcttctcaccttgcagagtagggtacctctgaggcccagtcaaataatttctgtttctgtgaggcaggtttgggaggccaatagggcatcaggccagtccagaatattcacatagagaaacagagcatcagcgtggaaatgaaccttagacacttcactgtcccttgactcccactcacaaagatgtgaactaacacccagaactgatggcaggtagcaccttccattccacaccctcgacgcagccaaggaaagaatcccagggggaaaatgaaagaagtactctgtacaaagctttgtttgtgttagcaaaacaattgggaaacatttcacgtactgaacaacagctaagctaatccaacctcagttcatcaagatgagaaaatgcgccccaccactgagccactgagcatgactcgtgggaaccagttctctatatgtacacgcatgttggagatgatggaaaagaagaatgcagagtctggagtaacacgctccatgattctcttgttccattgtatccatttgtatttatttttaaaaaataacagtgtctatttcagattgtaaaaatgatacatgttcattctggaaaatttgaaaaatcagaaaagtgtaaagatgaaattttgaaatcatactttgccctaccctcccaaggtaccaccctttgcattgggtgttttcctttcacttgtttgtttgttttttttcccctatgactgtatatgacaatttcctaccttttgcctttgatattacaacatggcatcaggagcgtttccccattgtattatttataccatattttactgattgtaatatttcaaattttttttatctctgtttggatatatcttcaactgaaagcatgtcatagttaattactacatctttttcctagatggatgtaaaataatggtcagttctacaattgattgaattagatttattaagatatggaatgtgcttcaaagtatgatttttatgcctatataatagtttattttatgaacataaacatattttattagcctcttatgttagacatttaggtttttccaattttccactttttttcttttttttttttttgagacaagatcttactctgtcacccaggctggtgtgcagtggcatgatctcagctcactgcagcctcaacctcccaggctcaagtgatcctcccacctcagcctcccaagtagctgggactagaggtgtgcaccaccatgctggctaatttttgtatttttcatagagactgggtcttgctatgttgcccagactggtctcaaactcctgggctcaagccatccacccacctccactgcccaaagtgcagaggctataggcaggagccactgcacccggcctcaactttctactttcaagaagcatccctgaacgagaaatgtgtccacactgctcattgtttatcggagtagattcccaggaatagataaaatgagacaaaacaaatgaggatcttagaagctctggatgcagatgcatgtacacattgaaagggtctaaaagtaaatatgtgaatatggaaggataaagatgggcactatacttattaagctcttattttctgtggcattctttgtgtataggctttgaaatgatgatcgtaaggacaaatcagtagtgaatgactgcatttatgtgtgagaggaggtgtgcgtgagaaggggcagagaaaggagagacagagaaaaggagaatgagaaatgtccaacactgcagaggagtcctggaatactggaatgggtgatgtggaagtgagtgctctgaggtctggggtacagcaggaaaactgagagctgttgggttgacaggaggttgtttggtaagatttttcatacccttgagttccagggagatggctgttcagcagttggagcacaaagtctagaaagagcactgaactggatggggccaggcaatctgagttcacaccttggtctgctgatgataacttgctctctaactgaccatgagctcgtgacttcacatgaagaaactcatgatcctcacgccgcagtctcctcctctgcaaatgagggaatggggcaggaagatctttaggattccaccagctctgcaaatctgtagcttgggagttcccagcagttggggagagaaaggtgacagtatctggtttgtaactgaccccagctcccttgctccttgtggctcatttttccttagggcctggaacaactttctggagttcctttcccaggtccaggacatcagagccattcactcctatgggactgcacagggaatcagtacagccaggttcaggatgacatgggactcccctctctcacttcaccaaaactcctgatggcccttcagagaaacctgctgctttctgtctttctggagaggtccagaagaggcatgtaatggaagcagcctttagtcttacatccagcttacacccagttggccaacactttatcgcatgaccacatactaggttgcaaaggcacctgggaaatgtagtttttttcctgataaaaactgagactattactatgagagagaatagaagaacagaatccagaatagaagaacgggaaatgagcaatttctgcaaaaaacaaatcttcaaacccagagcttcagggcttcaaaaatccgtgtgatggtagaagcggcatattaaaatggcttatcaaattagggttcatcaaaatagattgaacctgacttcttccccatttcaaccctctcagaacttcccttctttctctctatgtggcaaagcttgaaggaccagtcttcagtcccctggtggctggcaaggttctccctgaaggattgagaacagatttggaattgcaagcacttccttggcttgttaagaaccaatgacgcacaatgccatggacttttattttaatatacaaccagaagctgcttacagatatcctcctgaattaaacaggggttatcaaaccattgcatttgtaaacctaaattagcacatcgctaagagtttttcagggccttgaaatcaatattctactaagaggtctggcatctttgcagtccttggcaaagctcctactgtgtatacctgtatagatggctgaaactcctgaaagtcttagtaagaacactttgttctcattgtcatcttgacttagctccagtgtccaactgctgctatttttgcttttcaattataaattgctgtgagtttagcttccttattatagatttagtttgttgtgggttgttcagttagccaccagtgtgtggtacctatctgtatatttgaagcccataatttttcaatcatcaccgtgccttaaaggtgtcatcagtggaccacctgcattggaatctcttgggtgcttgttaaaatgcggattcttgggttctcacacagacctcccgaatcagaatctctgggagtggtccctagaatatatgtctctgtgccagggagaacctgtgaacacatcttaatgtgttatcagggtggttcagaaacaaatcatccagatctttattgttaaatgagttacatgtaagtccccaattctgcttctatagagatagttgcaagtggatttgttctatttaaatatattgcaaaaggaaggtgccgtattatcacataaaattgtgcatcgcttcttttacgaagtacctgggaggtgattcataatgtccctctcttattcttctttattgttttccctctaatgcatgagtttgggtagatgaggagcctccgggccagccaagattagaaaccaccattaagacacaaaggagcataccagaccctgccaagtcagtaacttgctggagaaactattttaaagaaaagacatggggactaagacaaggagagctcctgaatgactttagagggtcatgagaggaaagccccggagccctcacggtcaaggatgtgtctggaggctgtgctggaaagtgcctgggaggatttcaggactcccgggagccctctggggaagcggcttcctttccgttcctgccttgtgtgctgggggaggggctggttccagggctgcagcgggccctttatccgctcctctcagctctgactggagcgctttgtgtcctgactgtgcccctcacagcctcttagtgacgggcctgttgtccaagatggtcccgaggctggtccgggcctgcgcccatgtattatgcagcagcagctgggacaaagctcctgtgtgtggaagtcgggtggggtgggggcttgctccccacagagtcctgtttaccaggcactgggatgtgagagggtgggatggtggggatgctgtgtacaggagctgggcttctcaatgctgcctctgagaggagagaggtgagggcattgtgggtgccacagcaggctttcctggctgaagcaggagtaatggcttagttcaggttcaggacagccagagaaatgatcctccacctcccagggctcctaggccggctcaggatgcactgcttggtcattaactgggtctctctgactaaccgtgaccccagttagttagtaattccctagggcacccatgagacaggactaatgtcatcctttctaatcaaagtggacagagaatcagtcattttccctggaccaggactcttgaggggtgctgccaggtcttgctcctctctgtgtaacccggggggcctggtgtagggcaatcacacagtggatgtttgtgagatgcaaaagggttttcaaatatttgtgatgtttccattcctgagccattggctgtggcttaggcttagatgagaagcagaagtgctatggttgaaaaatgtttgtgttcttccaaaatccatgttgaaatcttaacccctaaagttattaagaggtggagcccttggggtgattggtcattaaccagtcacctttatgataaatcatgaagattaaggcctcatgaatgggattagttcacttataaaagagacccctgagaggcccttgtgtcttccaccatgtgaggatgcagctagaaggcccatcagtgaatcagaaagtgggccatcaccagacaccaaatccgtcagtgccctggtcttggacttcccaacctccagagccatgagaaataaatttatgttgttcataagccactcagtttatggtattttgctacagaagcctgaaaggactgagacaagaaagaagatcatagccttccttcctagatgcttactgcttgatagagacataaactttgcccagatgagcagggtggaggaggctgccgtttatagaacacctactgtgcgccagacctgctgggtggtttacatgcagcggctcgctccctcctcccagcaaccctgtccaacatgaagccttttctctgttctgtgatggaagaacccagctcagactggttaagtaattgcccaaggactgactctacggcctgtgcttttgtagtaaacagtataatgatgggcataattgggttgctgtcggggatatggctaatcagaattatcactggagccttctcataataatacccctgcctcttccccatcacctcagatgcacttattcgggggaaaaagggttaagaatcttgggcaggaaatgtatagctttaaaaagctctctggtcatcctagtttcttctcagaaaagtatttagcattatttttagtcttatttatagattttggaactttactatgactccaacagaaggggaaggtcttgctcaaggtcacccagcccccaccaaggtctcttgctgcccggcctgctggctttactgccatgctccactcccttaaaagcaggcagctgccctggatccagattcaaaccgcctgctgggtgccgtgggccattgtgcaagtcttccaggccgcggtcgaatgattctgacaagcggtgagtacggctgtgtcagcgcgtgggccccagcgcaagcaggcaatcccatgtcatctgcgagatctcccatgggcgagggctagcgttatcaagggccccgagagctgggtcttgcctcttgggtgcacgtggtctcatgggggagacagacaggtgtgtgcagaggatggcacagtgtgccaaactggatttggttctggaaccaaacacacacagccagattaattccaactgcatggatctgagaagccttgcagaattggagttttgttttatttggaagacatgcctgaggataaaacaaagggtttcaaaggaagaagggaaaggaaggaactaaagtttacaaacactaggtatttaacttgccttgtctcattgaattttcccaagaaccaggtatatggagagtagtaaccctggttaccagatgaggaagcagggctctgaggggtcaaaaaaatggtccaggtgttgttgggactgagacagagccaggtctgtcagccttcaagcccgtgctttccaacaacattggctttcgtgggctccagggaatgggatgagtcatatcctgacactggtggctgtggggagtgggggctggggatgggtgggaagccagaggcaatgaggaggagacaggtgcatcagccactgtggcctgtggcctcttgtctctgcagatcttggagctaggctcacaccacttttcactcttctgtgtttttcaagcacttttctgtttaatgtatcctttgtcctcccttcactggtagtctgggaaccaaaggacttggttctagtcccagttgtgctactcaccagctgtgtgaccttgagcaggtcacttgcccatactggacctccacattcccacctataaaatgaagggtagtgtgcgtgtgtgtatgtgtgtgtctgtgactatatatgtgtggttgggtgtgtgtgtgtatgcacatgttcattctcagcaaactcagtgtgaatagtaggaccagataaactctaggtctttccttgctgtgttctctcccttttgggtgggcaatgctggcatcatcactctcattttatagaagatgaaagtggagtcttaagagggagtcctgggtaagcagggactaagccatactatgctcttccactcacttctaacaacctcaacttgaaatccccagtgggtggttgtcgtcccagtgggtgagccctgtgcctgaatggggcccttagagattgtggctgaatgtgggggtttgcatttgaatcttaggctactggaatgccctagtaacatgccattctggattactagatttttcaattcacttcagtaaatatttattgagcatctactatgtcccaagcttcctactaagtgctggggacagagttgaacagagtcagtacctgccctccaggaacccagttagtgctgtggctttcagacttttttgctatagttgctagtgagaaaaatcattttgttgtgacccaatacacacacatgcatacacacacacacacacaaatacatgttatatatacaaaacaaaaccaaaggtcatgatatgcactctattttctagtcttttctactctgcttcattttttttaaatactggtagcagcctaccactttgatttcataacctactagtaggaggtgaccctccagtgtgagaaacatgggttgagcgttgcatatattacacatgttgtattacatgtaaatcatgtgctatggaaaaggagcaaaaaaatgaattaatttgggaaaatcacagaaggctcccagttcaagtggcacttgagctgagtccagatgtgtgaaaagatttgagtaaacaggaaaaggggaaaggcagccagatggaagcaacagtgtgatcaaaggctgggaggcgtgagtgcgcagctgaggagatagcactgatgtgcctggcacatgagcagtgctcttcctgggttatcacacttggttctcaataatcctataggacagggactttttagcatatttgctgccgaggcgagcacaaggcagggactttttatctcttcatgttgcaaaagaggaaaatgggactcagagaagttatgtaacttgcccaaggtcacatggctactaagtggtagagccaggatttgaattcaggcagttacattgtgatctaaatatgaggttcctagacatgtgcccctaaaaatactttgagctagttcaaggggatgttcgaatacaagcctgaaaatttaaaatttcattctgtagggaagaggaaaacattttgcgattttgagaaagggaagtgacgtgatcaaaaatttatctaggagaggatcacagtggcatcagcatagaagatgggctcaaggagaggcaaggatacttgtcagaagatggtaacagcatctccctagtcaggtcagcagccccagatacaattacatcatatttatctttgggatgcagttgaggatattgctcatatatcacatactgataggaatgaaaggagaatgaatcatgttttcctttttactttgactgctaggaagcccagagccccaatctgtgttactcttccagggagcattcaagagctattagccttttatatattcattttgccttgccttagatcacctaccctcactttcctttagcctgaattttatcacttagattttcatcctgctgcaatgtatgcattttagtatgatgccttagagaaggatgtaaataaaatacaaataaaacacactgaagcaattggagagcattttttgtgtgtgcaagattgaaaggtcttagagggctggactgtcttatcatcccctggggcttctgtcgtggtgctggtgccaggtgcgtgcatcacatggatgtaaaccttggactgttggagctggaaatgttccaaatggctctctctccctctgcttctcaaaaatggacatagactaccagtagtacacaagatagtcccagcagggcctgaataaacatggttgggtgtaattgtaaatgctgggtgtaaatgtgtgtgtgtgtgtatatatatatgtacacatacatatgtgtacccatacatatatgtacatgtacatatatatgagtgcgtgcatgcgtgtgtgtgtgtgcacgtgttcattctcagcaaactcagtgtgaatagtaggaccagataaactctaggtctttccttgctgtgttctctcctttttgggtggacaatgctggcatcgtcactctcattttatagaagatgaaagtggagtcatgttttttttattttttattttgagacagagtctcactctgtctcccaggctggagtacagtggcacagtcttgactcactgcagcctttgcttcccgggttcaagcaactctcctgcctcagcctcctgagtagctgggattacaggcgcacgccacaacacctggctaatttttatatttttagtagagacggggtttcaccatgttggccaggctggtctcgaactcttgacctcagatgatccacccgccttggcctcccaaagtgctgggattacaggtgtgagccaccatgcccggcctaattgtcgtatatttatttaatgtgttttaggaaaaaaggtagctaggacatcaaactgtgatgtcatggcttaaattgcttagaatgatgtttgtacagatatttaaatgttagaaagagccaatttaaagaaaatttttaaataaacatggttcgggtgatttgtagaaatggcaagaacatgttggcagtgatacacaaattatgaagtttggaaaacactgattccattcaacctcttgtttgacaaatgactaaactgaggcccagaaaggacagaacacttgtccatgagtctgataagttattttaagccacaggagtaaagagggtcttccccttccaacctcattcaaaagtctgcgtttagggaacacctggtcccgcatcttgcttttgaatcagttttatatttccaaagtgccttctctgttttattctctcattcctttttttaatctgagtcttatcaagcagctatagtagggtaattatttctttgttttgcagataaataaactgaggcccagagagggagtgtgcctgccgtcactcagccactcactcagccagctgaggcaggaccagggctagaaggtttctaggccttcccactgtgcgtgtcaggcagggttgggcggggagccagtttctctgatgaaatcccccaacaaagggtagaaagtctgctggggtaaatgcaaggcagtctgctggccgagctccacttgggagcacagcgagcggtacagggcctattatatgctgctccgcttccgggaagctattactttctgaaggagccacagatgttctcctcgcctgctgattaacgggtgtgttactcagcttggagtggacggatgagatcggcagtgaatattctcaactgtgtgaccaccataaaccctgccagtgcaggtgtagggaccctcaaggccataagcaatgtagccacagcgtctaatgagcaattgagcatcttggaggtgccaggacctgtgctcatggctggaatggaggcacagacaaatcacacactgcctccagccccatgggactcagtctgctaggggaagcagacacataaacagttagctggagaacaacgcagtgcgtgccagcatggagacctggagcaagcacgatgcagggagtgctgagttctttctcagggaccagagaggcttcgcagcgctggagacatttgaactgtactcgtactattgaatagggtttggcaggaggagatgaggaggaggcattcctgaaaggggacctgcccagggttccacactggcctgaactggagaccagcacatgtgcacctgggatgggaatgaactgtggctctgtcttcataactctgcctttccagatgggttggttaccagagccttgtgagaagagattggccttgctttggtttggttgttggtttgtgttagggaagcaatgtgacttaagaggacaagctttgggataatacagacctgggttcaaagctcagttcagctccttgacagtcacgtgacattgggcaagtttcacttcttttttttttttttttttgagacagggtctcctaggctggaggacagtggtgcaatcatgggtcactacagctttgacctcccaggttcaagtgatcctcccacctcagcctcccaaggagctgggactataggcacatgccaccatgcctggctaatttttctgattttcttattatttgtagagataggttctcactatgttgcccaggctggtatcaaactcctgggctcaagtgatcctcccacccctaagtgatctcccgatccaaagtgctgggattataaatgtgagccactatttgaccttctgagtcttggttttccatctttaaaatggggataatctcttttgcttaggagtgagaattaaatgagacgaagttggagaaggacttaacccatagccaggtttgtagtgggtgctcggtacattcacgacaattgtggcaatgctgctgggtgagtgactgcatgtgaaaatggagtgtgtgggggcatgggcatgttttgagactgcccagctgggtggactgtgtgactgcagtgtgaggatgtgagggttggttgtacattcccttgagcgtgagctgactggggaagacatgcctgatgctgttgaaggccatggggatttggtatggggtgagctagcctataattcactctgagttggaaaggattctccagtgtcattcagttcgacctgaacctgctatatgagtcccatccttgacatctgtgctaagtgacctccagtttctttaattgccttcagcaatggggaactcaccacctcccaacacagcaaatcctatcgttggacctcaccgactactcattagaaacagaagcagctcagccctatggagcaccttcagagtcacaagattcacccccacaccccattcattcattcatagatatttgctgagcacccttactaccagatactattctgaatcctggggatgcagcagaggaccaaggcagacacaggctctgtcctctcagagtttacagttttgttgaccttaactcacaacacccctgtgaggcaggcagaagagattagaatgattctcattgaacagactgggaaacaggctggtggtggtgatggtgatggctgatatttatagatacttagcacgtgtctggtgctttgtatactttagggaatctaatcttcatgtcagccctaggaggtaaaccccattaatatcacccctcttttaaagatgagaagcatagctgggtgtggtggtgggcacctgtaatctcagctactctggagactgaggcaggagaatcacttgaacctgggaggcagaggttgcagtgagccgagatcacgctactgcactccagcctggacaacaaagtgagactctgtctcaattaaaagaaaataaaatttaaattaaaaaaagatgaggaagcagagaagtgatattgtttgcttagggtcacacagcgaggaaccggcccggctcttttaagcccgggcccatgctgcctcttgaatcaagtcattgagactcgccagagcaatagagcaggggccttgactgaagctgctggatgcagaccctgggtgctttgcaccaccattggaaggtcatgtgggagccctggcagtgtccatgcatgtggaagcctgacgtgagtgacagccagtctggcccacccacagctgtgtttacaccacctcctcacccccaccccaccccatcccatcccaaagagccagaagtgagtgaggtcagcctctcccgccctgcatgtaaacagaggctggaggaccaggagtcatctcagggcagtgcggttgactcctggtgggagaagccaagggcagcttcaggttcctttgctccagaaatcctgttgggcgtctccatcccagcatccaggagcctgttgctcccaggagcagcagcagcgggtgggagggcaggcagggctgggtgaggattaccgcatgctggatcacggctgctgggtaatccccgtttgtgccacttgcaaagcatgaggttggaggcgggtgtgtttgagcagccccagcccctccattgtcgacaccacggattacagcagcttctctctgcagctgagcgtgggtcgcacagactccttgactgctgtgttgggaagatgccctttctaattcctcctgctctctgcccagccctcctcagctcaacctccaacaagaaggaggattttcagccctagagactgggtgatggaaagagacttgagacagacttaaaggactggggtggcgggtcctgctgtcttgagcaggtgacctaacctgtaattctgtctcctcatcccataaatgaggataaaaaataaagccagctgcccagcttaagtcaggtaatccatgtcagggtgctctgtaaactagaggcaccactctaccaatgtcggctattagaatcagccatggcacaagacttgcagtggtgtgagactgcagtcccagctgctcgggaggctgaggcaggaggatcccttgtgcccagggagtttgaggctgcagtaagctatgatcaccactgtactccagcctgggcagcagtgagaccatgtctctaaaaccaatgacaacaacaaaaatgatattagaatcaacagtgagcacgactaccaacacaaataacaatcgtgatcagcaccacatgagtctgtgaaaggtactgttcacagtgtttcctccagcctggaactgatattaggaactaccgtcccttgggcctaaaactaatatatgatgtattagttgtgcattcaaatcaccttgggggctttttaaacatcagacccaagagttcctggggtccatgcccagagattataattcactagatctggggtggggctgggcatctctgtttttttttttcttttcttttctttttattttctttgagatagagtctcgctctgtcacccaggctggagtgcaatggcatgatctcggctcactgcaacctccatctcctgattctcttgcctcagcctcctgagtagctgggattacgggtgcctaccaccacgcccagcaaatttttgtattttcagtaaagatagggttttgccatgttggccaggctggtctcgaactcctgacctcatgatacacccaccttggcctcccaaagtgctgagattacaggcatgagccactgcacccagccatgtctctgtttttaactccagtgctagtggtcgaagaccactcctgcccagagtcaaggacactgcaggacaagtgactgtatgcccagggtcccttcctctgcaccacactcggctgttcctgagcctccttgcaatgggcggtccgagcatgccgctgtatgctggaaggaccccgtcttctcaggtgccacgcagggtttaggaatctctaaacttgaagcttttccacagtttattttatgcaactttctctatctagaatggagacaaacgtgtcttcagctaatttttttttttaactcgggttcttcgaggtataatttacatgcattaaaaaaacatcttttttagtgtccacttctatgcatttcacaaatgcaaacaatcgtgtaaccaccatcactatcatgatacagaacatctccactgcctcctgaaattccctcctgtccctttgtggtcaggccctcctcccacccccaggccttgccagcattcatccgtgttccatctgtagaagttgtttttttccagaatattatatcaatggaatcattgggtatgcagcctttgagcctgcttgtgcactccgttacaggtttttttcttgtttgttgtttcttgttttgggtttttttgagacagggtcttgctttgtctcccaggctagagtgcagtggtatgaacacggctcactgcagcttccaactcctgggctcaagcaatcctcccacctcagcaccccaagtagctaggactacaggtgcacaccaccacacccagctaacttttgtattttttgtagagacggggtttcaccatgttgcccaggctggtctcaaactcctgagctcaagcaatctgcccgccttggcctcccaaaatgctgggattacaggcatgagccaccacacccagcccagctttactgtatttgagagtcatccgtggtgttgtgggtatcagtagtttgctccttttattgctgagtttgtgttccatcctgtggatgtgccacagcttttcttcctggggtaatttaattgtttctagctttcatccagaaatgctgtctagcaagaaatgcaatttgtttgattcatatgtaaatctttctgcacgggctgcttcaaaagtcaaaaagactcactcttcagcaattttttaaaaatgttcctactgcgtgctgctgtgagggcacacagttccagtgcttacagggctcagatgagaaccataacgcaggagggggcttgagtgtaattggagcatccccctcccctcctgaaggggctacagtgggaatgtgggtgcatagtagtttctgatttttgatttttgaaaaatcaaagaagtctaggtttttcttaaagatcctgacttttaaaaaatgttggcaactaatttagaacatgcttaatcactgtgctggctgctagctgctggctagattgagtcctgtctcacgacctgtggcttatgtggtcctgagtgctagagattcagacaggtgttctcccctgggccctttgaggacaagtgatgtggacagaagggagaagccaggggcttggctgacacagatgcgggactcccagcctttgagtgaggggaggaggaagcaagagactcagagtcttcccgggaatcactgcttctagagcagtggcttttcattctcactgtggggagctcaagaatacagaggctcaggccccatcatcaagtccatttcgttggctggggagagacccaggtgtcagtacttatgaaaaaacgtctccacaggtgaagttaagcagcaagggctgagaaccgctgctccagagaggccaggaggtctggtcagaggctggggccccagcccccaggcacctctctgtgtcagtttccctggagaagtcatgagtttgaagagtaggcagaggccaggtgtcatcactgagtcactcatcaatggccaatgagagtgcaaagggtagctctgagcacaggatgtgtagcaagactcctgggttcagctcccagtcccaccactgccaagtggggatccttagcaaggtacttaccttttttctgcctctgtttctacgcctgcaaaatgggcacaataatgtcagattcatgaggataatgaggactaaattagttaattcctataagctgcttctaaacgtattacttataaaatttcatttttacttgtttatttgttttactttatgtctgtgtattcattattgtatgattttgtgctggtctcgtatgagggattcagaaatgactaagacatcatcccaaccatcaaggagtttggagttagacccgaacacaggaaaagcaatgcaccagggcagggcaacttgccctcagtgcctgagagtggtttatggaccttcaagtgcaggtgggtcgccaggaagaaagagtgtgttggtggggggtggtcagggaaggtgtgtgttgggagagagatgagtaaaattccaggatgcagagagaagagggcgggcatctctttggactctcttggggttggggaggtggaggtaaccacgtgcctgggacaataaggagagcccggctatagcataaggagctcgtgggagaggagactctgcatcatggttgggtgagaggcactgtgacaaatgtggtcttcatctgcaggatgggacggggagatgtaagcaggaaatggcttctgccctgaccctctatgattgtattaggtgactcagttatttgctgagctgaatcttgcaggggtagcctcatctccctctgtctgcttacccctgccatagaccctcaggcttacgggtacagcccccttcctgccccgcacaccctggtgtatcctcatctccacgcctccctgtatcatagctaacataacttaactgagcttctggtgtagaagttcgatgaggctctgtgctgagggagtttactcactcttacttctgtacccgaaatcttccctccctgcccccaaactggaaacacagccttccataaagagacctcctccaaccccaccaccacccaaaccagcaacatcagtgctggagagaagaagaaaaggggaagggccagcataatttgggtggggctttgcatatattagtaataacaatgataaatattcaacaataatggtacattaccataatgaccagatctccagtgccttctacgtgccaagcactttgcaggcatgacctcatttaattctcacagtagtcacagagaaaccccatagcccagttaagcacacaccctatggagtggaaggcctgggtttgaatcctttctctgtcccttcttgcctgggtgaccttgagcaagttactgaatgcctgtgccttagtttcatcccctgtgatatggggaagataatagcgcctgcctcactgggttgcgatgaagactaaggaaggcagtatttgcgaagtgctttgaatagtacctgacacgtagcaagtacaacactaagtgtgaaatacattaaaatatgtaacatatctctttatccattttgtaacaagggaatagaaacaggtgagtcaagggactttacaatagctacatgtattaagcccatggtatgagcaaagtaatgttacagttactgtacatgtattttcttttaatccccacatcagctccatgaggaggcaccattattatcaccacagttgatggacaaatggggccccaaaaggtagatccacttgctcatgacagagcaatagagaaaggccttttcccagggcttatcctgcctcctccggagtctacatggactcacccagcctctccattcattccctgaggctaagcattgctgggtacaagaggctttctgctgagagggatgccctcagtttcccatgtgatgtggaagataaggcaagctggggaaagggcaggatgagaatgtgggagggagggaccactgggtctcctgggacacatgtgccatttgcctccagatggggcagggagaaatgaattgtaattggacagcagagatgctgtaactttatttggagttagcagaggagagccaggaaggtgagaccagcaaggtctgctgggggagccatgggatcatgctggggagtgccgaatgtatcttgcagttttgcaaagttgttgccccctcagtggggctgctccacattggaaattctgcagtagttctgaatgagtcaatgtctgagaaaagcatttagatcagaagttcaggagaataattggaaaggctccattgcaggtctgctgtgtgtggttgtcagagttgtgccctgcacaaaggcacctggcagggtgtaagtgggggctgaaatccagtccacattccactcactgagcctggagctgattctgttggaggaagaggcgcctttctctattctcacaaacgtgccctgtggactggagtggtcctgacgcagtggaagaggtgaggagagagactttatccccagaggcagatttacagaggccagactatgccagtggtttggtactcaggcaaccaaagctttgactttcacagaaaccaggagggcccaaacaaagagcccaggtgctggggatgaaacgatgtgcagggaaaggctatgcactgagcagctcccaggccttctgaatgtccttatgaaatggtcaggggaccagcaggagggtcagtgacacgagcagcctcagtaggggtcagatcaggaggacttggacgaggctgaggcagaagctaattgagaaccctgacctcatgactgggacccaactcgctgtggagtcaggagcttgggctcttaaaccagcatgtgtatgtgtgtgtgtgtctgtgtgtgtgtgttgtgtgcatacacacgcactatgtctaagtggacaccttgaaggaaaagcaccccagtagaaagagtcctttaaaaaccaggaatccaaaaggataggtaatgcccctgccagaggcaccctgccctggaggagttgcctgatgccatgttctgtcacccagcattgccattatgttggaagggaaaagggagggtgctggtgtttgctcagtgcccaccaggcaccgtgccagatgttctgcatccattacctcgttttcctctccacccctcttcctcgtggtttctgtagcaatgacagcattcagttgaataaagaaagaaaaagagggaaaaaatctcctttcaaggctcagcagtgttgctggacccaggggatgctgtgtggggtggtcgtgtgcaacgggcagcatgaacttgactatcgctccctcgacccaagtggtcattgttatcatcccctgagctgtgcaacttttccggcaactgcatggcaggcacgggcagccgcatcagcacaccccaaggaacggtgctgagggatgagagaaaacctcgaaatgaaatgttttttttttttgttcctggcaggggcaggcctgctaggcttgggtggggctctgtggtctctgggcctccttaaaatagcaaagttctttgctgtgggggcagaaagacctcatggggacaggtcacaggcagtgttcaaagactcagagatctactaccctgttccttttcttctttatttccatcagttggaatgctttaggctgcgagtaacaaagaaagccaaccaagactgactcaagctctaggattttcatggtttttcaaacaagagttgcggaggaaggaggtcctaggtttggtcggtggctccacagtgccatcaaggacccaggcctcttctgtccttgtggtctgtcttctcatcattttggccttttggttgtaggcttgttacctcttggccacaaaatgggtgccagagcgccaggatttacatcctcaaatggaagcaaaggcgggaagccgtgtgtgtgccagtatgccaagaaagaacttttcttatgtctctctcctcttactgagacaaaaatccttctcagaagccccctagtggacttcctcctaggtctcacttgccagaactgggtcttggaccctctcccaagggtgaggggtgttcccgtggtggtgcagggcggttgggggtagggggtgctgggaatggcaggtacgagtccagtcagcagatctgcctgcctcccttctccaggagcttgtcccagtgctcccagggaacacctggatggccgggttctgcagtggtgcttgactccccatgtcccccaaaggccagccacttgcccgtcagtgggttatggatggtctccatgtatagggcattgtgaggaagaccaagagggtggagactgtcctgagaaggaggcagtgttgcccccatttttatagatgagaactcgagctccaaaaagtttatgaacttgtctagggcttgttatacattttgtaacattttacagatgagaacacaagctccaaaaagttaatgaacttgtccagtagatacctagtaagtggtggcgctaggatttaaacctgtgtctgtctgtgaagccatcctctgtttggcccactttggaacagtgtcctctcttcttccagaatctcagccaggaagtcggcaacctttagacttcctgtgcattccagctctcagagctgacaccagggcccagcttacagcctccgggagaagttaatctcaacacgtgtaaagagaaccaaccaaccctgaagtacacaccaggggccagggggcagggtggcagccaggaaatgctgcaggtgttcaggggagggtaggtccctggggatgggatggtcagagaccccgtggggccaattcgtttacctcttgacatcagtagctacaccagagaaggtgctgacacctgcacaaagacagcccctcctgagctgccaggaggaggtgctcctcgcagtcagtgtaaataggctgctggaatggccccagatggccaccagggagggccacatgccatccctcagcatcgctggagtgggctctctcttggttgctagcaacagattctgttgacctttagtaatgagggaggcagggctagagggtgactagcagccaggcctcccaggctcccaggcctctcagatgcctggaatttcggagctagaaggtagtcagattcccgttatcttgactgctgcagcggggtctctgggatggtgatgtgagtgcctcctgcacccgtggcccccatgtggcataactccttgggcgctattcatccacacggcccatctgtgcagggtacagccttcatggtcttagctggcagccctgacaacttggatgtgcaaagaagatacaagtttgtttcctctgaagcttgtctggtgtcatccaggagccccacctggtaggtagcagtgataaaacgcattcagctcggtccagtagagttgtgatggagtcagccagacaggactcttcatttgctaacacggagagacagaagttgagaaacgtcctctctcaacaattctggctcttaagatattttgtggctgcagaatcctatcttggatgttggaatgtgaatttttttgagtcctgctttaacagtccgaactctccctggataatggatgtcatttgtttattttttaatttttgtgtttttttggagacagagtcttgctctgtcatccaggctggagtgcagtggtgctatcttggctcactgcatcctccacctccctggtttaagtgattctcgtacctcagcctcctgagtagctgggactataggtgcgtgctagcacgcttggctaattttttgtatttttagtagagatggggttttgccacgttggtcaggctggtctcaaactcctgacctcaagtgatctgcccgccttggtccccctaagtgctgggattacaggcgtgagccaccacacccggccaataaatggatgtgagttaggggagagcaggaaggttacacctagtaaatgcagaacagtgcactaacattatttttaaaattacagtgatcccctttacattcctctctgacctcttctccatctctcttccctccgcttatggcttctgcctctgccaccaactagtggtgcaatgtagcccacatttaaacccttcaaggggaggagctggttggtttagctgtcaccattgagtgtgggtcacttctatggagcagagctgtgtgctggacagtcatgcagaatgctacatgaccacctagaatgaggcggcctcccttgtgaactgggggaacagagggcattgtaggggaactgttggccacagatcccagcaagactcctctttccttgctgggtcctaaattaactactggattctttttacaaggcagggagtgagaggtggagaacatcatgagacagttatcacggatgttttcaaacaaaaacccattgatttcctcagtaccattaagtttaatttaaaaaaaaagtttctgctctagtttctagaccctcagctggtgaggccccttgaattgtttccaaagtccaagaggaaatggttactccaacatacacacacacacacacacacacacacacacacacacacacactcactccttggggacagcacagggtggacagtgcaaagaatttatctccaagtaagctctgtgcatgaggcctggtatctatttctttatgggcaagttgatttactatccttttttatacccaaaatgattagcagcaatataaagaacttcaacttctcctttctcacatttggggcactgagagatgggcttccttttactctaacagagatactacaacggagccggcagatcgtccttctcttccatgccatcccctggctgtaatgtagatagattatctcttgggaaggggaaggcccatcaccagttaccacattcccctggggacagtttatcagtccatctttttctgcattgccaggtgacagggagcaacgtcttggtctgtgggccaggggccaggccaggcactctgaacacgggatcccggttatcctgagagtcggtcagggcatgtcacaggcagggagcctcggcagtggcagctatgcctggcatctccccggctcagcctttggcctggactatgaaacagccttttaaaaaagttgctcagcctcacctaccaagaagccggaggccatgaaggagggggtgaggagtaggacctgctgtggacagagaatagggctgaaaaccagaagtcctgggtttaactccaccagcccttattgagcacttggtgtttgcatgatcttgtgcatgacagtctagaaatgcagaagaaagccctcgagggatgcattaggcccagctcttttactcactcgctggccggcagggtggttgtcaggggcaaacccaaagcacttttgaaggtgcagattgactgataaaataatctttgttgagcagtcacagttagcaaagcatgttcacacacagtattatttcactggatcctcataactatcctaggaaaaatatgaattatatccatttttctgatggaggaactgggaggtaaagggacagatgcaaagtcacagagctgaagtttcagagggcccagtgctccttgcaatgccactcagggaccaaagtctggttccgggaccaatagcttcagcatcacctggcaacgtgttagggatgcagattctcgggccccaccctcgacttcctgaatcagaaactgtgggcctcagcaatctatgttttcacaagcccaccgggtaattgtgatgcacctgcaagtttgagaagcactgagctggagagtgatacccaactgaatcatctatgtgaaccacctggaccaccaccgtgttcaaccatagattctcatttgagtcaagggtggggcctgggattctccatttctaaccagctcccaggtaatgccagtgctattggtccacaggcagtccattgaacagcaaagatcccaaacaggaagcacctggtgggcttggttaaaatgcacatttcctagctcattcccacagtgtgtgattctgcaggctggaagtggggcccgggagcctgcatttccacaaacacttcaggtgattctgaggcagatgacctggggctcgcactccaaggatctgttccccagagctcgagcttgcagaccatccaccctggcctcattttcaaaggttttccaccttcactcctctccccactggtcttgaaccacccatttgatcccctgccagactttgggctaagggggtgcaagttggaggccatctctgagccagcagggccctcagttcctcaaaataggtcaggagtctggcacagaccagcctcagtggctgcaaatagaaaccatctgttgggcctgtgttttgagctccaccgcccctctctgcctggccagagaaacacagaactcagaagcccagtggagcatggatgcttccctgagtgggtgctattctgccaccgcctgcccagacagactcccatgggatctgcctgcaggggaggggtggcagcaccagattctaccacccccagggcaggaagcttgcagtgtggaccggtcatccagagacaagtcactcctcctctctgggtctatgaaatgagaggctggatttagtggacctgtgagtccctttctgctctgacaggatacggttccttgaaagcctttttgtgtcaggaccacatggaggaaaagttgggcccagaggaggcagacatttcattttcctggctctctgtgcagagtgaatattgtgggatctggtcctgcaaatagggggatggacaaggtttgtgatctggagctccaacgggactcttgtaggccttgaggcaaagagttgggttgctcttccttgtctctgccctcctattccttccctcactcgtatatttatcaagatgatgttaagcccagtggtaagcctggaaaaataaggaggaatgaggtgcagtccctgccctcaacagcagccaggataattgaggagcagacaagtaaaggagagacctcggtgacagctctgaatcagatcccagctcctccacttcagtgacctggacaaacccagacgcatctggaaatgggaataataattgtacctatttctcagggttattttaaggatgcaggatataatgaatgtagaatgcttagctcatcgtaagcactaaacacacgttggctgctgttagtgtgatgagccaggagcaaggggagcacagcatggaatctgggggcctcagaagacttcccagtgaccatcctaggggaggtaggaagctgtcttgaagagaatgaggcagaggtggctacagccttctccttacatgtccggccttgttcaccagagcaggaaaggctgcagggattcagggcagaggcctggtatagaatagaccgtgtctctggctgggcttgcattgggtggtggatgcatgctgcgtatcctcccctctagagactgttgagaaggcgccatcccagccctgcctgttcccacttggcttagatccactccctgatagcatgagggaggcaggacagagctgggtggcgaggaggaattccaatttcctgggtgagaaaaatgaggggcttgcccaaggggccctgtgagttggtaggagaactgtcctggaacccaagaattccatgtttgtcagagatgcagagaaagacagtggagtgactccagatcatggccttcctaagtccctgtacaccccacccaggaacttccaggtgtggaggtttggattgattcttttcttccaggatttaggacttttagtagctaactgatgacttttaggagctaattgatgtcttttctcccagtgctgtccaatgcaacacactgcagtgatggaaatgctctgtaatctctgctgtgccatatggtagccactagccacatgtgcctattgagcacttgatatgtggttagtctaactgaggaggagttttcaatttaattttaattaatctgaatttaagcagctgcatgtggctagtagctaccatacaggacagtgcagttttagcctactctaaggtgcacaggcaagagcagatactcccaaatgttggttccacagatacatgccttcacgacacactcctcacatgattctgatgcataaccaagtttggaaatggtcagggcaggggtctgagagacgctatgctgagagaaatggcacagtccatgcacctcccattgtctgtttggctttctcattttacaaaggaggacactgaagcctggagtccactgggaattactgcccaggctggcgagcccctcgggactgtaggctggttccctctgctcctccagtatggaaacatgtgctgtgttcctcctgtgtgtccagctttcccgggtggagggggaacagatgatcagctctcgctcacgacccagaatgctttggatgagatggagcagttgataacggtgtctttccttcatgacagtgccatactattttctcttgtgttctcatgttccatcctcatacagattccaggacccaggtcagttgatacccacatatcacagaagaggacactgagcctggagaaggaaggcggcttgtcccaggtcacatagctagagaccaaactagatggaaagtgccagtctttctctgacagcacatgacccaggagaggctctgccacatatcctgatgggctgccccatgggagctaccagggcagatctgagagttctcctgggctccccacattacacagctctttcccagggggcttcctcccagccctttgatgtgaatgtagccacattgccccctcacctgagtcagaaactaaaaaaactgctctcttacattttcgtgttccacttaaaagctaaattttgctcatgtcatcatctagaaaatgcacccgctggccacaataaatcatttttgagatccgaggacaggatacaatttgcttccatgtggagtgtacatagtgattatctcagaggggagaaaaagccatcctacatttcttgagaggctataagggccattcagctgcaaaatgaatactttttccttccgggccctccccatctgggagggagaccaggatggccctgggcccagggagaggctgccagggagcaggcccagcagctgtgcacatctggaatccagaacctctccctccctcctcctgaccctcagcccagcccagcccgccctgtcctcctcctcctggcaaagcctgacctccccaagtaaacatttgattatttgaagtcagagactccctcacaggagaaggagagagggtagagctagtgttgagcaagcacccatcctgggccagacactttgccaagcaatttgtgtttggtcacttcattgtatccagtgagctggatgacattattctcattttacagttaaggaaactgatattcagacaggttgagtaggtagtccaaagtcgtacaactaacaagtagcagagccaagatagaaaccactggattctttctgactcctaaaactcttcctgctacagtttctttacacttttgtgtagggccctgtatttatggagctactggggaggggtaagagttgaggtggagaggctgaaggaggagaagatatgtgttgtattggaaagagcagtagactaagagtcagaagttcttggctgaagtcttggctacaccattttgatagcttgtgactttggacaagtctcttttaactcctccatgagccacacagacactctatgttgtaaatgggattgtagcacctgcctagttctgcccgctggacagcagcggggctgacagaggtggtgtctggagaggatcatgactgcgggtgggcttttcagggtggttctgcaggcactggccccttgctgattctgtgctgtcaacagcaagggactcactaggcctcagcctgacagcagtactgggttcagaggtgttggtattctggtgatgaggagtctaatggagacagggctgcgtgaccagaagaaagaacatggtagaggaagggctcatgagggagggtaaggaccagaccctcatcctgtgggcagggcagcacatcagcctgaaaataaaatgcaaaacctcagcaggctgaagtcacagccttggggtgaggttcctgaaggaggcacctccttgtgcttgaccttggctcttgcccccctaccatactgagagatgattcagccagagtcactatgaggctcagctataagggagccctgaacccggcatggagtggggtggggctgtgcaggggccagaaggagttggatgatctggtaacttacaaaccactaactggagaaagaaaacatgcatatctaaagcttgaaataagtgccaaaagcattaatcagctctgtgggacaccctaaaaggaggtggctattgccatgtaagagctgttgtcattcagggtcacagcaacccaactggggtaggggaatataaaagaggaaggcccccagccagggtggcagaaccaaggtggtagaccccaaaactcctctctgttccaacatgatgtctttaataaagtagaggaactctattatctcagggctggaaggcaatctaattccattcactgttccacatcgtccttaatcggaggtcatccacctaaatcttgaacccccccagggatgggaagctgactacctatcaaggtagcttctttttccaagttaggcagctctaaccattaagaaagtcctttcttttacagagttcaaaaccaatcttgaaaaccaatctcaaaaccaatatgtcccagtcttgcgccttgtgctcattggtcctaaaagattcaaagagagtgtgttctgctctcactagaatcagtcagggggaatctaccaggatctgggcagggctttaagggtaaaggcaaagggccagattttcaggtcacctcttggccgcccccaccgatttccctttgaggtctgggcacctcccccggttacagcctcggcaaggcctcctctctctggcagagtagggaggagtcttttctgttccctgcctgcgcacccatgcatctgacctcacagtgaggtcagctccttagtaatgcaggtccttctgcagacacccagctttggcccacagtgtgtactcgtgcctggcctggccttccagcctctgtccatcaccttccagaacaaacccttggcactggccaggtggcctcctcactgccaacagccagaccaggtgtgtgctcacacattccccctgccctctcctctcctttcgcatgctttaccaaagccaagtaactgataatggagacatagtaacctgaatcaaatcaaggccttagacctaactcttaaagtttacaagggatacaggaacaactttggcattgccctgaagcatcatgagacaaatcattggaatgttttataagatgactgacaactgacctggtatcttccaaaaggcaatgctatttaaaaaaaaaaaaaggtgataggagtattgtaggttaaagaaggcaaaagagagatcacaaccaaatgcaacacatgaacctaggtttcactgaatcctaggtcagaaactaaaatagctgtaaaaggcattggggggaaatttaaacacgggctgggcattacatggtactgaggaatggtcagttttctcagatgcgatgatggtgatgtgctaaggaaattgccgtcctttgtaggaaatgcatgctgaagtaatgaggaggcaggagtcatgatttttgcaagttcttttcctgtaattccacagaagtagaaagaaagagaagggctggggtagaggaggaggagcaactggtgcttggagcagcaaagtgtctttcccaaggtcagtaggagtctgaatggggagcggagccaggactgcagactcccagctcagggttctgtgtgaagacttagcataggttcacgtggagtggagctccacgcccagggttgtggagccattgatcaacagcagcccctgacctcccttcccctggccctttcaaaggcccagcagagagaatctccatggagatccagtcccagcctaccagccactgtggagaggccagcccaggcttgctgagagacagacactctccattctttccaggaagcaggcctgcctcattctagggcctgcccaggcccatccccggggaacacgctgagtgggagaacatgcctgctcaccccgagcctgagcgctgtggtcccccaggatgcagcatccagctcagaagtgctagctgggctgtgggggcaacaggagatggataaggagtcactcaagagaccacaagtgtgcccaccagagccttcaccacagatgcctccttcctgtgtctacaccctgaggactggggagctggggatttgggggagagaggaaagaagggcagagagtgggaggaagcagaaggagcagggaaaaggagaagggggagggtggacgaggaagaggtgaagtcagatgggaaaacaggcacagaaactgcgggccgctgagcgctccacctggggaacctggggtaagtgtggactttgccgggtgggctcaggagagcctatcaggtcagcatgtcctgtgctgggcatatgacaggcagcttggcactggctcctcccaagcccttggaggtgatggggatgattagccacctttattttttatttatttttttgagacagagttcggcactgtcgcccaggtggtagtgcagtggtgcgactcagcccactgcaacctccacctcccaggctcaagccatcctcccacctcagcctcccaagtagctgagactataggtgtgtaccactatgcctggctaactttgtgtgtttttggtatagagacagggttctgccatgttgctcaggctagtgtctccaatgcctgggttcaagcgatctgtccgcctcagcctcccgaggtgctgggattacaagagtgactcacctaacccggcctagcctcttttttttttttttttttttgagacagagtctcattctgttgcccaagctggagtgcagtggcgcgatctcggctcactgcaacctctgccgtctgggttcaagcaattctcctgcttcagcctcccgaccagctgggattacaggtgcctgccaccatgcctgctatcctctttaatatgggagtagatggaagtggcacagagaggttaagtgatttgcccaagtcacacagcagggttgggatttgaatctaggtgtgcgtggcttccagtccggttcttgtgacccttccccttgtaccccagggagagcctgcggtgacgtctgcactgggaagagcagagaactgggcactcagtctagaaacaggccttgtgcagaccatccccggtgcccagccacgggctgtgctggggttggagacagaacttgccatccctttggctccctgagcctcaggttctggtgtcatctgtctccccactaggctgggctcccttcatggataggctgggcctgccacgaggccagttacccagcaggtctccccatggcctccacgactcacctaggctgcctgggaaaagtgcaaactagtcttcagtctttcagaagaccctggtatcacttcctgccatcacagagcagtgccccacccccaggatggaagaggctaggacaagctctagactaggagcccagggagaggcgccggctgtctgcggattctgagaaggtcactgtggactatgtagatcagagtgagtcgggccttaaaggctgagggttggctgcacagagaagacattccaggctagaattgcacagcaaggaacaggaggttggagtgaccaagctcaacacctcctttctcgtctgtggaaactgtggcatcgagaatgttctgcatggaaaagacagagaaatacctggtgttctcacttcagattaaacttttgccaggtccaccaaccacccatactgtatttttcatactgtatttttctttgaattgattcactttttaaaacttagccacattagcagtagtatctgtgaaatcatggatttggcatgcaagttatattttttctaaagcaatttaaaataaacacatgactggctaaaattaacttcatctctgtaaccatgtaaaggaccacctgggaccccactttgggaatagttggtgtcctgatgaggagccagtgcttggggaagggagagccttgcctgcagtcacatagtcagcttggggaggggaggggagaggctggtctgaggtcacacagcctggggaggagaggggaaggccttgcctgaggtcacacagtcagcctggggaggggaaagggcagtgacccaccagcctcccatccagtgctcctgcctctccagcatgactttatccagacagtctggagcagaactcagcagagagagacagcaagtgggacagggacacagcatgggcaaaggcagggaagtagggaggagcggagagcagggagactggccctgtgggatggagggcaaccttgggaagtggagaagaggcagtggagaggcaggggttggggcccagagagctggtggaagagaatttgcttgaaggtgaggaatcttccctgggattctccttctggattctgaacttcttccttcaataaagaggagtttgtgaattagctcatggcttgatttaaatcaaatgcaggccaggcggcaccgtggctcacacctgtaatcccagcgctttgggaggccgagtcagatggatcacctgaggtcaggagttcaagaccagcctggccaacatggtgaaatctgtctctactaaaaatgcaaaaattagctgggcgtggtggtgggcccctgtaatcccagctactcaggaggctgaggtgggagaatcacctgaacctgggagacggaggttccagtgagccgagatcgcaccattgcactccagcctgggtgacagccccatctcaaaaacaaacaaacaaaaagaaaaaccaacaacaaaaaaaaccaactacaaagtatatcagttacaacaggctaggatatgctgtaataacaaattaactccaaaatcttagcggcttataacaaaagtttgtcactcatgcaaagtccgctatggattctgtaagtgttccaagacagcaacgcctcatgtagtgactcagcaatccagattgctttaatcatgtgctttgtcatcacatgagactctccagttgtgatggaaaagtactgattcctgggttccatcctcaaaatattggattcagtaggtctagattgggacccagtaatcagcatttcttataaatgacataggaagatcagagacttccccaaccccagatgactttgatacaggtgatctgtgggccacatgctgagaaaccttgctccaaagggtaatctggcataggaggagtcttggatttccagtcaggagacctatgttcatggccctacttagctgtgtagccttggacaagtcacttaacctctctgtgcctgatgatatgatgataatatccaggactcagagatttctgagggtgtacctgtggattagaaacactagagaatccgaggggatgacagtggatggggggttgccttcttgcacgtggagagacatctccccaccccactcctgctgtgggccctgtcctcaatcttggtaaacactggcctctgctgtccgcatctcccatgctgaaccgagcacagttccagatactcaggagggagtctgtatgtgttcttgcttcgctctatcacatgataggttcctgggtagtaaaaggaccctacaacctttctagaaagtggggtgggcatgtgtaccaaaagctcctatgccaatctttgtttttgtaagactttattaaaagatgaaacccactagaacgggctgggcatatgagtgtgccctgaattcttggatgcttcttcctttccatctcttcctgacaggggacccagggcctgctcacctgctgcacctctgagccgcagcttccctcccccaagagcccagccgaggcccttcatggcacagggcccagcctgacccttgtctctcctggcccctcacagatgtcctggcgtccgcaataccgtagctccaagttccggaatgtctacgggaaggtggccaaccgggagcactgcttcgatgggatccccatcaccaagaatgtgcacgacaaccacttctgtgccgtcaacacccgcttcctggccatcgtcaccgagagcgcagggggcggctccttcctcgtcatccccctggagcaggtaggtggcccctaccttcactccagctgcagctccagggcagagaggagccctccttggtctctcttaggcctgttgaccctacttctctctgagttcccaccttttacttcctcatcaagcatctagtggctatgccttctttagggttttcctgagattcaacagaacaagtgcaggacctggatccaggagacctgagatctctttccagagcttgcctaaaggtatgcacttggacaagccactcccttggtgtacacaaggttccattccctgagggagtggaacactctgatctccaagaccaagtctagctctaccactctgtgtcctgagtgtcctcttggtttggagccggaagggatgaagacctagccataggtattatacattgagcatctgcaaaaattatacaattttttttttttgagatggagtcttgctctgtcgtccaggctgaagttcaatggcgcgatctcggctcactgcaacctctgcctcccaggttcaagcgattctcctgcctcagcctcccgagaagctgggattgcaggcacgtgccaccacgcccagctaatttttgtatttttagtagagatggggtttcaccatgttggtcaggctggtctcgaaatcctgacctcaggtgatctgcccaccttggcctcccaaagtgctgggattacaggcatgagccactgcacctggcccactcattttttttttaattgctctctactgagagactggaaataatttaccttcttccccatcccccacctcctatctaaagattttcccctttctgcagctgcttacgtgaatataacagattaaatctgaaaaacctagatcatgaaatttttaagccatagccactcaggcggagtccccagaggcccgtgggaggtcacgcgcttcagggaaagtgcttgctgtcagtcccacttgtttatggctgagttcccccttcccagcctgactcatccccactcccaccctccgccaaatcgctcagggggaggaagaggtgcatgtggaaggaagccttggttctcaaaattcactgtcagctggtggtggaggatggatttttccagtctctcctacccacagtgggggagcacagatttggaaaaggcttagaccagatcttcctctccatcagaggggcagctgcagggacactgaggacagagcctgatgcacagagaggtccaaggagcatgcacttgatggcgggaggtctgggttctgcccttgccagacttgggaccgtgtgcatgtcacttcacctctctgacccttattttcctgtaatggtaaaagcaggatcagaaatcctcctctgcctacatctgtcatgttggccttaagtgagataatagatgtgaagctcctagtgaaccacacaacatgttaaggatgtttggttacttttttggggaagttatccactatgctggtcaacttggcaaaggctcacagcagctctaacacattcggaaggatcctcaaatgcagcttcccttccctcctgaatcagatggcctccgatcactgttgcctcagggacgcactcagctccatccatccaggcctgcaggtccccaggaacatgtgggctggttcttactgaggctcaaacctatcgccggcaccctgccatgctccactttaggctcacaagggtcaacaagcaatacctcacatcatgacaaaaattaattccagatgcattaaagatctaaacatttaaaataagaaaagctacatgtgtattagaggaaaatggagtgcatgtttaaaatcatgcaatgaagaaaggcttcctaagaaagccaggaatcccccaaatcataaaggaaatgaataggttagaataaatttttaaaagacagtttctgtattacaatgaggcacctaaacaaaatgaaaactcaagccacatacttgactacaatatttgcaatatataatagacaaagtattcctgtgaagaatatataaagagttccagaaaaattaacaagaaaaagaacccgaccggacacggtggctcacgtctgtaatcctagcactttgggaggccaaggcaggcagatcacctgaggtcgagagtttgaggctagcctgaccaacatggagaaactccgtctctactaaaaatacaaaattagccaggcgtggtggcacatgcctgtaattccggctgctctggaggctgaggcaggggaatcgcttgaacctgggaggcgggggttgtggtgagctgaaattgtgccattgcactccagcctgggcaacaagatcgaaactccatctcaaaaaaaaaaaaagaaagaaagaaagaagggactggggccaggtgccgtggctcacgcctgtaatcccaacactttgggaggccaaggcaggaagatcacttaaccccaggagtttgagaccagtctgggcaacatagtgaggccctgagaccctgtttctacaaattaaaaaaaaaaaaaaagaaaaaaattagccgagcatgatggcttgccctgaagtcccagctacttgggaggctgaggtgggagcattgcttgaacccaggaattggaggctgcagtgagctatgatcactcccctgcactccaccctgggcaacggagaaagatcctgtctctcaaaaaaaaaaaaaaaaaaagagtctgggcatggtggctcacgcctataatcccagcactttgggaggccgaggtgggtggatcacctgagtttaggagtttgaaaccagcctgaccaatatggtgaaaccccgcctctactaaaaatacaaaaattagctgggcatgatggcatgtgcctgtagtcccagctacttgggaggctgagacaggagaattgcttgaacccgggaggcagaggttgcagtgggcgagattgcgctactgcactccagcctgggtgacagaacaagattccagctaaaaaaaaaaaaaaaacgaaagaaagaaacaaaaggccgggtgcagtggctcacgcctgtaatcccagcactttgggaggcagaggcgggtggatcacaaggtcaggagatcaagaccatcctggctaacatggtgaaaccctatctctactaaaaatacaaaaacaaaattagccaggtctggtggcgggcgcctgtagtcccagctacttgggaggctgaggtgggagaatggtgtgaacccaggaggcggagcttgcagtgagccaagattgcgccagtgcactccagcctgggccacagagcgagactccgtctcaaaaaaaagaaagagagagaaagagagagagaaaggaagaaaggcaaaagatatgaataagcaattcacagaaggcaaaatatatattttaacctactaattggaaaagatttaaaagagtaataatcatcagtattgccaaaggtgtgagagagcaggtgctcaaatacactcttcgtaagatgtaaatgaggcaagttggcaatttctactaatatttaaagatgcatgtctactgacctagcaattccactctaggaattcatcctacagaaatattctcaagtgtatttaaaaaatacgtgtgcagcattttttagtactcgattatttttacaagcctcaatttttaaattatattcaataaaaataaagtttctctgtcaaattgcttaaacgtttctaaacgcttcctctcaatttctgtaatggtaacaaaatgttttacactgtcagtagcactggtctggaatatgatcacactttgtaaacacttcatggacagcagaaaagaacgtgttctttacagagtatgtctatatatagaaatatgctatatatatacatatcaggtgtatttgatatatatcttttttcaactttatttgttcacgtgctgtaatatattttatttaacttgattaatcatggacttattgtgaccactcacactaccaattgatttctgttgttttctctcatttcaagaagttttcactttacatgagtactgagtgattgtgtagcaattttatgatagtgaaaggttggaaacaacctgcaggtccatcattaaggaaatggggtaaacaaattagggaagagccacacaaagggacactatgcagtcattaaaatgatgctgtagagcagtctcgttctccagcgttcagtctcaggatcactttccactcttgattattgaggatcccaaagaacttttgtttatatgggttatatctgtcaatagttagcatattcaaaataaaaatgaaggaattttaaactatgtatttattaacttgcataatgataagtctatttcatgttctcctgaaaaacatatttttattaaaaataactttttttaagacaaaaaagttaatgagaagaatggcatcattttacacttttgcaaatctctttaatatatgtctggcttattagaagacagctggctggctttgcatatcacacattatgcagcctttggaaaaccccactatacactcaagagagagaatgagagtgaagtggcagacaatgtcttattattgggaaaatacttttgacccaatggactgcattaaatggtctcggggatctccagaggtccccagaccatacactgaggaccagcgatgcaaagtaatatttaacaagagaaaactatttatatgatacactgttacgtgaagaaatgcaatatgcgattaatcacattaaaaatatctaccccctgtaatcccagcactttgggaggccgaggcgggctgatcacccgaggtcaggagttcaagaccagcctgaccaacatggagaaaccccgtctctactaaaaatacaaaattagcggggcatgatggcaggtgcctgtaatcccagctactcaggaagctgaggcaggagaattggaggcggaggttgcggtgagctgagatcgcgccactgctctccagcctgggcaacaagagcgaaactctgtcaaaaaaaaaaaaaaaaaaaaaaaaatggagacattcctggccaacatggtgaaacccccgtctccactaaaaatacaaaacttggctgggcgtgatggtgcgtgcctgtaatcccagctacttgggaggctgaggccggagaatcgcttaaacctgggagccggaagttgtagtgagccgaaatcgcgcaactgcactccagcttggcgacagagtgagactccgtctcaaaaacaaaaactatctgtttacctatctggaagcgactgcaaaaatatacatcaaatgtcaaaagttgttacctcccaagtattgggaccatgagtgctctttaattttcttttcccttagctatatgatctaaatttcttacaatcagtacttaacgttttgtactttcgaaaaaatagaggcaattcgctgatgtgaagagggagcccctgaagtttcagaggccctacaggccagagaggggctcagtgcagggtgtgcactgggtaaagacgaggggccccatccgctaggtttgcctgctgccctctggtcagatgaatgtcttcatctgccttgaacatcagccctcccttatgtatgttgcaaatgtttcctcccagagtaacacctgaatatgggctcgcggtagaaagttcaaacagaactgcaggacccatagtgaaggaatggcgaggggtggggtgggttactgactccgtgggagggtgaggcagctccttgatctgcgaggctcaagtaagtagtttgaggcaggaccccgagtctggggactatgggacgcagggtcccgcctccaaagcgggatgacttaggtattggagccagcgccggcttcccctgccgcccaagccatggccgtccctctaccgccccctgtggtcagggctgggcctgcaggcgtgggacagcctctaggttggtgcagggggtgcggggagagggaggcagtcaggcccaatgcggaacccttcgttgatctggcagcggtggagatgttgttccacactagccgattttctaggaaggaaaagggtcagattattttagctccagttttcaccccctcagtttgatagaaatttccctgaaaacagtttcctgtattcaatacaaacacagaaaagatttggaccatttcttggtgactgcaaatcatcacttggagcgttagttataagctattaattcatggtgggacagtcttgtccctacgctgaatggctccagatttttgtcttgagcaaacagcaggccgcagagaattgtctcagttcttctctaagttttttccctccactatccagcatatcctctcattccttgcttgcttttctaagagatttggaccagaagagaacagcacctgcccaggatccccaaatccctgccccgaggccacacctcctgagggaggctcagaaccttccacagagcttttctctccttgctccatttccttcaaagccagcttgcttgagatttccatatttatgattaaaaattcttctgcagagtaggaagccgtgtctacaacaactacaaacaacaaccgcgaagatgctttgcctttgtacagcactctcaagttccagcaaactctatgttcattgatcctctcagcaggtgggtacagccatccccacctcacacttggggaagctgagacggcacagccgggcatacagtatggaccccaagccagctcacttatttctgaatccatgattctttccaccacccatgatgctggtaaacagataagttctggctggcagatctcgaaggagtggctctgtcttccccaggtctcttattcgggctgccgttgtgaaggccagtgcctgttttttcccctagttaacattcagctgccagctctctggagtggaatgttaagctgcagatgggggagcaatcagcaccctgattgcctggcacagctggaggggccttatgaatattccagagagcaggcactgtgcccagcagcctgattaaccactggggcctccccaggggcaccacccctttcctgctgcacttcacccggactgcctgccacctccagatccaggccacaggaagaacagggctagaaacagagctacctgctaccccaactggcacctggcagaaagagaagaaacccggcctagatatcaagagtctgggttctccctataacccagccattctcagtcccagctgtacaccgggtctctggggctgggatggtgcattctccttccccaccacagtagtgtggcctgaggagcttttgaggatctaacatacctgctctgtttgaatctcacctcaagttctatgatgaaagtatactcattctcctcgttttacagataaagaaacagaggctcagaaaagtcaagtaactcctttaagactgcacggcccacaagtagcagagtcagaatttagcccagggctctcccagtcatgtgcctgcccaccttacagaggtttagagggaagcatttctataaatgtgccttgtattactattactgccatttggatgtcttagaggatttccttgaacattaattcaaccaacactttattacacctctctgatgagctgacaccccatgtgtccatctcttttggaagccgagagagtagatgtttccaaactccatacaagtgcagcagatcttggggaagcttactctctgaaggaatgaagcaacaattctagttggcaaggagaggcaggggtggggtcctggagcagcggtccagacaagatagcatcactccagcagtcaggaggcaaaattggcccaccgacccacccattcatctaacagatgggtattgaatgcctgctaggtttcagtcagagttcctggaccgaaaaggaagcagtaaacaagaccaagtcttgaccacctagagtttgtagtccaattggctacctctcttggaccgagagcccccaacggtgggaaacttgtctggtttgcacaggggtggctcacagtagatcctcagccaaggggccattgggctgacctatggccaaatcacagaggcaggtgcccatctactctgagatggggtctcttctttgctgatcctggcagcccatccccaccagatcctagggagaatgcagcaccatacaggggctgcccacactgaaaggggctgcatcctcccctgaaagcccttagaacgatattgcatggcccagctggtcttaactctggagctgaatctagaagttggtggatcatttagctccatagctcacagcatgtctgaggcctaatattaaaagaagggtcaggaggaaaggtgcccagctcagtactgaggactgtaataaaataatattttgtttgcttacccaaagccttcgttcccattccagatttctgtaacaccccatcactcccccacaatcagcactgagctcctcaaaccttctctcccccaggaaaaaaaaaaaatgcctgaatcttcatcactgctctgcagtgaagtctccgcccctccaagggaattcagagagccttttccaaatccatttttcagatctttcctcaatcgttctttgttcttcaagctgccttccgcttggtgcaatttgcatctcaaagcccatgacagcctgaatgtacagtaagtgactttggaaaagggaggagaattgtgctctcaaagagaaaagtcgcaactttatttcatttgtctgaggctcgagattgacagcttgctttgtgtttttccttttttggaagaatggctgctgatttttgaggaaagtgaaggcgagcccttctgcagaaatggaagtgtcgctctcttattttattacaaggttatgggatgggcgttctctggatttggagtccagggggccagagatgcagcctggctagtgggcatcatgggaggtcaaagaatccatccctctcccttgggcctgggtctacagctgagctgtcttcctggctccattcctctcattccttgcagagccagggaggctggaaattatagtagctggttcactaggactctgtgaagtcaagccatgggccctaactctgcccagaggcattgccctggcctctgaagcatctggcagtctgcttgatctgctacccattttccttctagggcctggagcctcccatacctttggaagttgtagctccaccccttagctgtgaaaccctaggcatctaacatctgtttctcagtttccctgtttgtgaaataataatagtgcatgtttctcagggtgctgtgatgattaaataaggtgctgtaaaaagcacttagcacgtagcctggcccatagtacgtgctagtaaacgggagccatggtgatgccaaggactgttacccatctccaggccaccccatcctagcaatagcctgttagctttggtgggatttggagcctgtggccagcaagtgtgagccttgtctttggccttcctgctactgttgtctggcacagtccctgagtatgcctagcagtgagctacctcgaggggaaggtacccataggcaagtcatttgtgcctaaaggggtacagggatggtggtgcagggtctccagggaggcatgactgaggtggccatgccaggctgggtgcctggagatgggggattctagggagggtccagggctgccatggagcctggtggtgcccctctcaagccagcctgcctgtttatctggagttggactgcctgccagggtttaatgagggaaggcatgtaaaggttttaccacagtgcctggcgtacagcaagtgctcaacaaatctgagctatatttcttctattattaaaagatccaggttggtgggagaaaacggtgctggaattgagacggaggctccttggagtctagctggctcagatggaggcacagccccattgaatgagcatgagctctgtgctctgagccaggctgaagccacacagtcctcacagtccatgcctctcgccggccctcctccccagtgccccaatcccagtcttacattgacacaatgccagagtcagaggggaccccagggatcatagattccaagcgccttgttgtgcccacgacaagtcctgatcccaaaaaggagaagtgtcttatccaaggttgcatgacatgcctggacaccctctggcccccttccccagaatccttgccctcagccacttctcagagtccacactcacatctcctaaggtgtcgatgataacaatggctttcctttactaagggaatttgcatttggttaaggttagggtgagatttaaggagaccaaactcttgagacccaaaggaatgtgttggtaatagtggaattccagtctgcaggagatctgtccacaaagggcggccatccccaagcccctcaacaggaggccaggtagagacttgctgttgtgtctcatctgagcctgtagctttggaagcaccctcatgtgtcagtgactctcagcacttcaaggaacaaaaatgatttagggtgcaggaggggtgtggggagtggaactaaggttgcctggcttgaaacagagcatctccctgggggcagttggggcccagaggccttggccaaggctcctaccactggcctttctcctggcagcttccagaacaatggctgcctgtttgccctgcctgagaaacttcaggcctgatttagtccttagggcagtttccacttccagatggccttcctcatgtccctgactgctgcccacccctccccctccccctcgcaccgtcccccccgccccccgacccaaccaacccgctcccatcccaaggctcttgacttgatggagggatgtgggaggaagaagggttggtcccagcattcacagcctcacgtgtcaagagacagatctgtgacatcagcatcacatagcacttcttgtctcccccctttccattccactcagccaagaccttgatttcagttgctaagcaacctgtgcctgagtttccaagtgggtcgtcaggtgagcatgagaggtggaaggtatggaggggtagtgcttaaaactctgcaatttatagatggagacactgaggcccagaaagggcaagacacttggtcaaggttgcacagctagttagtgccccatgtgtcagatgattgatcctggcagcaaatgcttcagaaccatcccatttcccactcctccttcccccaccaagagaagcacccagacaacagcaacaccttagagacttcccgtgagaggcttccatctacctagacagggaggcagtgtgcccagtgattaggggtgcagggtctgcatcagctggcctggctttcaaccctgactctaccatttgccagctatgttctttgggcaagttacctaactgatctgtgcctcagtttccttcgctgtagaatgagagacatgctagtcctaaccccgaggctgttctgaggattcagtgaggtgttacataaagcctggaaggtgcctggctcagggcaaacctttcagtgcaagtctgctggtgtgatcctggcttgctgggctctgatgcaccctccccacctagggtccagtccccccgatccccagtttgctcatttatctcatgagaattctgccttaatgttatgaggtcacagatggagtacaaaagtttgcaaactttagtttttaacactgaataattttattcaaataaaacagatgaacttttgggggagtcagggatagatccttttggcagtctagaaaaacccatagaccccttcacagaataaagtttttaagtatacaaaataggattacgcaagaagccaattatattgaaacacaggccaggtacagtggctcacacctgtaatcccagcactttgggaggccaaggtggaaggattgcttgagtgcaggagcttgggaccaacctgggcaacatagcaagacaccatctctacgaaatacaaaaaaattagccaggtgtggtggcatatgctagtagtcccagatactcgggaggctgaggttggagcatcacttgaacccggggaggttgaggctgcagtgagctgtgctcatgccactgcactctagcttaggtgacaaaatgagatcctgtctcaaaaaaaaaaaaaaaaaaaggaaatacagttatcaaaatgtataccagaattgtgctgtaataagtgcttttctatcaatgcattacgccccatgattgagtgtaggacacagtaacgactctaatttcaaagtcatgatgtgcatacatattttgagttaatagtagcagaagttatctgaaaatatctgtgatacctgttgatgaacacattataggttcaagtaatcctgttggggtttgctgcctacatttatacacgaaagaaatgtgaggtttcagttagaggctagtgaaaatatagatgtaagttgtctcctacccagactcacaaacctcctaacagggtctgtggccccactcagattaaagaccttggaaataaaatcagagggaaatattattgtataaaatcaggacaggcagaactgctgtggctgaaagttggtggggagggagcaatgcaatagacctgagcacccttcactcctgtggggctccccaaactcctaagcttcactggcagttaggaaacctagcttctctgcctggttctttgtaaccttgggtgagttcctttgcctttctaggcctcagtttccccatctgtaaaatgagatgttgggcccgttgtcctccaaggtctcgccagctctgacattctgaaactctgtgcttctcctcccctggagacaaaaaccccagaagcttgggtcggtaggagccctggaccagggagagggaacagctggggccaggctggccagctcccaattgttcaatggaggaggaggagggcgagatgcatggtgctctccaaagcgacagctgggtgagcctggctgggggcctcgtccccgcctgccatctgtgcctccttcctgccttcggccagtggggggccagtgggggttgtggttggggcctaggccagataacaacctgggtagaagcgggaggggctggccaagaaaatgcagggaagagtctggttgctcactcttgggtgcttaactctttgcacccactccccactttttcccaccctgatctatagaattctggaaaggaagtgatacacagccctaggtccacccgagctgcttaatggctctgtgaccttgggcaagttacttaacctccctgagcttcattcttctttgtccagtagacatcattcctaagacctactctttgggattggaacaaggtgtaaatgaaacagagtagataaagtaccccagctcagtgctgactcagtgccatgggcctgtccaaagagagcttatacctgggactgtgaactgctcccgctgatcagaatgcaacatggaggcctgatgagcccctgtgcagtgtttgtgaagtgctgtcgctgtccccaggcacaggcggctttgcagccagctttctctcctacacgcctttgccccggctgtttctccctctggattgccctcgcccaccaatatccacatgcatacaactctacccacttagaataacttatctatttataaataagtacttatatttaggcaaaaccttcatgcagttggacagtttaaacttcagaagcaaaggacctgcagtggacggtctgcctttcaatcctagcttccagttactcagttcctccagtaggagggaattgctgttagcagttactggagtgtctttcccaaaattatttatatgtacatacttaaacctggaagagtgtgagggataagggcgctgacccctgcaccattgaaaatccacatataactttcaactcccccaaaacttaactctgctgaccagaagccttaccaataacataaacagtcaattaacacatatcttacatgttatatgtgtatatactaaattctcacaataagtcagctagagaaaatgttattaaggaaactgactggacacagtggctcatgcctgtaatcccagcacattgggaggcccaggcaggaagatcacttgaggccaagagttcgagaccagcccaggcaacacagtaagagcccctctctaaaaaaatttttttgattaaatttttaaaaagaaaaccataaggaagagaaaatatatttactattcattaagtggaagtgaatcattataaaagtctatcctcggccagacatggtggctcattcctgtaatcccagcactttgggaggccgaggcggacagatcacctgaggtcaagtgttcaagaccagcctggccaacatggcgaaaccccgtctctactaaaaatacaaaaattagccaggtgtggtggtgcacgcctgtagtcccagctactcagaaggctgaggcaggagaatcactcgaacccgggaggtggaggttgcagtgagccaaggcctgggtgacagagcgagactgtgtttcaaaaaacaaaaaaagtctatcctcatcttcatgctgagtaggctgaaggggaggaggaagaagaggggttggcattgctgtcagaggtggaagtggtggtggaggtggaagggaagacaagagaggcaggcaggcaccctcagtgtaactttacagaaatatatcgtaatttctgtctggctttttcatttctctaaaaatgtttctatatggtaccaattctcctttgaccatgtgcctgtatcatgggagggttcatgtcatgaaagaagtcaagagcagtcttgaataattggacccttctgccagattgtctaatgtcaatttgtttgctggtgctgcttcttctatgtcttcttcctcattgtctggcattgcttcagaagcactcatctccatcaagttgtcttctgttcattcctctagtgtgatgtctgttagctcttaagcttcttcaagattcatatcttttttttggcaggctcttgctctgttgccgtggctggagtgcagtggcatgatcatggctcactgtagcctcaacgtcctgggctcaagtgatgctctcacctcagcctcccaagtagctgggacttcaggtgtgcaccaccacacctggctaatttttttattttttgtagagatggggtttcaccatgttgtccaggctggtcttgaactcctaggctcaagcaatccacccatcttggcttcccaaagtgttgggattacaggtatgagccactgcacccagccaagattcatattttgaacccttcactcctacacaccttttttacatatccacaatctctttcattatttccttgaatggctctgtggtaaatccggtgaggtcatgcacaacatctggacaccgttttctccagtgggaatttattgcctcaggcttgatggctttcacagctttttctgtaacaatgatggtatcttcaactatgtaatccttccagattttcatgttgttctctctatagaggttctctttcttagtgttgacaatcttttccatacagtaccatgtgtaatgtgtaatgagtctttttttttttctgttttttgagacagacttttgctgtcgcccaggctggagtgcactggagtgatgtcagctcactgcaacctccatctcctgggttcaagcgattctcctgcctcaacctccccagtggctgggattacaggtgcccgccaccatgcccagctaatttttgtatttttagtagagacggggtttcaccatgttggccaggctggtctcgaactcctgtcctcaagtgatccacccacctcggcctcccaaagtgctgggattataggcgtgagccaccgcatctggtcagtaccatgtgtaataagtcttaggagttcttatgatttcctgatctagaggctgaattagaaacattgtgtttaggagcaagttgaactcatggggttctgggtggccagagatattgtccaatatcaaaagaactttaaaaggcagtttttcagggacaaaacattcaaccaatccagaaaaagtgttctggttatccaggccttcttgtacaaagactaccagctggtgttaatcttttcccttcaagacttgggagttagcagctttacagataagggtagtcctgatcataaacctgactacatttgcacaaaacagtagagttagcctacccctttctgccttaaatcctgatgcttgtttcttttcctcactaacaagtgttcttaatggcatatttttccagaacagggcactttcgtctgcattaaaaacctgttcagggcctggcgtggtagctcacgcctgtaatcctagcactttgggaggccgaggcaagtggatctcttgaagtcaggagttcaagaccagcctagccagcatggcaaaaccccatctctactaaaaatacaaaaattagccaggtgtgatggcgtgcacctgtaatcccaggtactcaggaggctgaagcaggagaatcacttgaacccaagtggtggaggtttcagtgagctgagatcatgccattgcactccagcctgggtgacagagtaagaccctgtctcaataaataaataaataaattaattaattaattaataaaaatctgtttaggcagatgtcctttctcttcagtgattttcttaatggcttctaggaactcatctgctgcttcctggttggcagaagctgcttttcctgttatcacgacattttatgagccaattttctttcaaaatgatcaaaccaccctttgctgatgttaaattatctgactttagatcgttcaacttccttttgctttgttttcatataatgatttcaccttttccggaatcatattagaatctataggttatacctttcttatagtaatcctgcacccacataaaagctgtattttcacaatgagataaggtattttgaaaagtgcagggttttcatgcctgctggcataactcaggaataacttcatgaatttccttttatttttttacaatagtccttaagctggattcatttatcttgaaatgaggtctgcagttgtcattcaaggtttacactattgcactaaacacgatgaaaaatacatcaagaacctcaagagatcactttgtattgccatatgcaatttattggagagatgaattgaatcatatacatggagatgattagcctcacatgcattttaagcagatacttgcaacacttgagcttcctgcaatagcaacaagagcaggctacaaaattattacagtagtacagtagatgccacaatttggtgcagttatgacttaatactgtgtcattaacatttgtttacatttctctcaactgcaaatgacaccatgtatgatctgaaagtgtgtgtatgttttgataaatttcagcttcttataatagatttgtatatattttatgccagtaaatgataagacagactagtatctacagatattctatgcatttatgacatacctttttcttaattttttttttcctaaacaggctaacacaggactttttcttaaattttttaaaatatttctaggctacctggtttatcgtgagctttttcaaattgtcgctaaactcaaagaaatttccaatttattgaaaaaaaatctgtggataaatggacccaaacaattcaaacccgtgttgttcagaggtcaatcttttttacacgaagatcaccaactacctacattgttctctctacatcttgcttttttacatgtaattatatatcttggagatctttccacatcaaatatagaaagagtttccttgctcatttttatagctacacagtattccattgtttggatggtcatcatttgtccagccacattttgcctattgataagtatttccattgtttcttaagtttcactatcatagacagtgctgcagagcataactgtggacacgctttatttcatgtgcatgcaggtacgtctgtagaataaatccctagaatttaaatggatagttgaagaggtacgtgctttcttccaggaaacacacacacatacacgcgcacacacacgcagaagaatttcctcctgacattgtagtaggcagttttcttaacaggacacagaaagcaatagctataaaacaatcaataaattgaacttaatcaaaattaaaaacttttgctcatcgaaagattcattaacaaagtgaaaaggcaagccacagacagaggagcaatatttgcattgcatatatctgacaagggattagtattcataatatgtgactggatttaaaaatgagaaaaaaaagtggacaagacttgaataagcattgcatgaaaatggatatccaaatagccaataggcctgtgaaaaggtactactttcccagagtagtttcaattagcattcttattaagacagaagttgaaatctctttatgtgttaagacctacttgcatttatttttgtgtgaattgtttatatgctttgttcatcattactcaccaggaagatgaaaattaaaaccatgagttactactgtacatccaccagaaaggccaaaatttagaaagctgataatatcaagtgttgatgaggatgaggagcagctggaactctcatactacactgctgggagtgtacagtgttacagccactttggaaaactggatgacagaagtattctacattttgatcatggtggtgggtttatgaatgtacacgtgcaaaaattcaatgagccttacagctaagatctctgtaattttttttttggatacaagtatatcttggttaaaagtttcagagttgggggaaaggtgtgtgcttctgaaatgttgacaaaattgctttccgttgagattgcaataatttatatttgaaccagcaaagtgtaagtgtgcctgttcatttaacctcttaaaaactgagagttattggcggggcgtggtggctcacgcttgtaatcccagcactttgggaggccaagacaggcggatcacgaggtcaggagatcgagcccatcctggctaacacagtgaaactccatctccactaaaaatacaaaaaattagccggccatggtggcaggcacctgtagttccagctacttgggaggctgaggcaggagaatggcgtgaacccgggaggcagatcttgcagtgagccaagattgtgccactgtactccagcctgagggacagagcgagactctgtctcaaaaaaaaaccaaaaaccaaaaaacaaaaaaacctgagtgttatcatatgttttaattttttgccaagctgatgagtgggaaactttgtcagagtagtttcaattaacatttttattaaaaatgaggttgaaaatatcgtcgtatgcttacaatctgtttgcatttcctttttgtgtgaattgtctgtccatattcttcacctattttttatagggtctttgattaatttcttattgatggaagaagtcctttatatgttagggaaatgagccttttggaatatgagttgcaagtatacgtttcaaatggtactttttgcagtgcagatttatttgtttacatttcaagtatttaagtttaccagtcttttcttttatggcttctggatcttgggccatagttagaaaggctttctctgagattataaagaagtaacctttttactaggcctttcactacttttagaatttcattcttatatttaaatctttggtgcattttgaacttatcttggtgtaaagaatgaggtatagattaactttttttcccccaggtatctatccagttgaaataattccaggtaatgagtaatcctttctttcccctactgatttgagattcaggctttgctgcattctacatttctgaatgtatttgggtttattttacagactgtccattattttctacttaatagtcttgttattcatgtaccagtaccacaatgctgtgttactaagacttcataatatgttttaatatcaacagggatagtcaccactcattgtggtcttttctcaaacgtagttggctcttctagcttatatattttaatatataattttaggatctgcttatatagatagaaaatattgatattttattgggattatgttaaattgataaattaaagagaatgtcaaccttatgatgttgagtctaaatatccatgatcatagtttactttttgtagtcctttgtgtccttttgtggtgtattaaaagcttcttcacatagctcttattcatttcttgttacacgtatttaccttttttattgtattgtatatccttttaaaattatatttgctaattgatgattgtatactagaaagccataagtttctgtatgttaatattttgccatgttactaaattcacaaatagcttatactaattttcagtggtttctcttgaggtttctagggatactattttatcatttgcaagtagtgataattctcctcttcatttatagcttttatacctctggtatatctttctttttttaattgcattggcaggtcctacaggaaaatgttaaatcatagcaacctcttgttcctaactttgatggcaatgcatcaggtatttaccttttacatattttgggttgagaaatattttccccccagcattttattattaaactttcaaacatactgcaaagtttaaatcatttagcagtgaacaccacctagattaatggtattaacagcttgctgtacttctcaaagctgagtgtcctatttgtttgaggtagagaagaggctcgaacagataattctttgggaacattctgggtagcggacataaaacctggcacatggcaagtcaacagatgatgctcagatatgcaaatactgaaagtgaggccccaggcagctagttccctttccaaggtgtcacgaggtgtcagaagtagggaagagcccagatttaggacataaggtgggtagggtgattctcagatgagaggaggcaaaggatgaaggcctcccccagtccccagtgttctgaactccacaggacccagggagtgggtgagtggccttccaggacaccattctttcctgacagctggcgggaatttcctttctctttctttctgtctactactccttccctgctggctcctcctggcagagccccagacaaagaaagagaagtggcctgagcaggtgcttccctcctcccctgaatgagctcttcctggagagcgagggtggagaaagcagggcggctgtgggcactgggggttggggtgttgtgttgggggatgggcagggaaggggccaagggagttttgtgcctctctaagcccatgtgctggacagggccttgatgttgtcctttcttatctacactattgcaatcactgcactgagtccccaaaaatgataaaaatacacagttttgtagtcaggcagatttgggttcagcgagatcagcgtgttcagggtggtatggccgtagaccagccaaatctaggcattgccagaaacctgccgcatgcccttgggtgagatttggctctgggctccttcctgggcagtgagaggatctgtggctcagctgcagcacaggtgaggagcaaagaagaccctcgacaaacaggccctaggcttccctctccccaggctccccgctcctgatctcccttcactctcatgctcccccacccctactctaaaaacccctaaggcctccctttctggatgaagtcctgccccaccctggctccatggcttggcccactctgccccttcctgactcacctgccctcaccagaccttgagccagccccggtctcttctacctgcctgcccttcttcatgctcctctctgcacagctcagggcaccgcctccaggaagccacctggagccatcctgcttcttcctctgctttgccaacagactctccgcttcctgccatgtccttgccatgtttgaggcaggggtatcgtggtctgttttcacacctgttcctgcttctaggcgatgggctccttgaggctgggaaacacacccattcgtttttccattcccaacagccagagttcagcccaaatactggacagggatcttttcggacagagaaatcttttgaggcccagggtgcagatgagtcttggccaaagccccacatctgcctgatggcaaagctttggatttaaaaccctgcgtgaggagtgggacgggtgaggccctgtggataagccaggtttgcactgggcctctctattcactacctcccccttctcagcctcagtttccccatctgtgagatgggagagtgcactgaagatgggcggggggatgtggaggaatgctgaaagagctagttctatgttttagtggagggagttgctggaaaggaaagagacttcagaccagttacttccatctctggaaatagaatatggggcagtgaagaccatgggcttcgggacctggagtcctgacccagccatttgctagatgagttattactcccgaaagccttggatttcttatttgtaaacgagagataataaatcccacctggcagggttgtcatgatgacagtaatcacccacacctgttgaacacgtacaacgggccagggactgttctaagctcttgagacgcctggtgccactgaatactcagcaaccttgcagatgaggaaacaggtatagcttatacaaagtcgcacagctgggaagtgctggaactggaataaaatagagtgatgctggctaagagtttagcaccatgcctgacacacagtgagcctcggtcagcgagagggcctaggtcatctgccccacaacgtgttcacacttgcaacctgcaggcatggcccagggctggggaggggggcgctacaggggatccaagaaccttctggatcatgcagacaacacagacaaggtccctgttctcaggagttgtgtgagccagtcaggagacaaacaatgaacaagggcgcaaacagtcgttaagattacatcagacagtgatgggtgctgtgaagaaatccaacacagtgatgccgtagagacttgtgatggatatgttaggtaagacagtccgaaggacctctctgcaaacttgaatgggatggagccggtcaagtaaagagcatgcggaagagtagtgccctagaaagagagaatagcatgtgctgaggcccagggcggggagccccagggtgggaagccaatggtagtcaggggctgggctacccagaaccttggagaccacgccagtttggattttcttctaggtgatgtgggaagccattggagggtttcaagctcaaggttagctctcacttgagctaaacaaagaaatatggtaacaacacaccccatagaaagccaaagacaggccgagcatggtggctcacgcctgtaatcccagcactttgggaggccgaggtgggtagatcacctgaggtcaggagttcgagactagcctgaccaacgtgcagaaaccccatctctactaaaaatacaaaattagctgggcgtggtggcatgtgcctgtaatcccaactactcgggaggctgaagcagcagaattgcttgaacctgggaggcagaggttgcggtgagccaagaccacaccactgcactcctccatcagaaagaaagagagaaagagagagagagagagagaaagaaggaaggaaggaaggaaggagggaaggaaggaaagagaaagaaaggaaagaagaaagaaaaagaaaagaaagaaagaaaagaaaagaaagaaaggaagcaagcaagcaagcaagcaagccggagacaggactcggccttgagaagcagggagccctgttcacgcccagaccatggcctgttcactgtgctgaggtgaaggcgacttggagcctttatctctcaggacacaactgggtgtgtgaaatccacacgggcatcttggcacctctgcagttgggcagattccctaaagggaacagggaatcttgctggccagggccaaggtgggaagtggctgtgaagagtgtggtcagttttccagcctggtgggtgggatgtgttctctgactgaaattgcagtatgctttgcgtgaatgcatgagtgggccagggctaggacagccaagaagagcaatctattcccgggactgaccttgacttttggcctcactttcgttgagctcaatgggcaatgctggctctgagttagctgtgagtttcaggaaaaaaaaattcaactttctaaaaatatcaatccaatggtgggttttgggctcaacaaagaaacccctgacagtttcctgttaataaaataaatatatttttcttggagaaataaaccaaataagaaaaaataaataaggctgggtgtggtggctcatgcctataatcccagcacttcaggaggccaaggtgggtggatcacttgaggtcaggacttcgagaccagcctggccaacatggtgaaaccctatctctactaaaaatacaaaaattagccaggcatgatggcgcatgcctgtaatcccagctactcaggaggctgaggcaagagaattgcttgaacctaggagacagaggttgcagtgagccaagatcatgccactgcactctagcctgggtgacagagcaagactctgtctcagaaaaaaaaaagggggggaaaaataaagaaaaatttaaaaatttttgaaaaattatgtatagataaccaactagtagaggtctggatcagaatcaagatggcaaagcagaagtacttagtggtttgttttgttttgagacaggatctggctttgttgcccaggctggagtgcagtggcgtgatattagctcactgcaacctccacccgctgggtttaagctatcctaccacctcagcctcccaagtagctgggacttcaggtgtgcaccactaagcctggttaattttttaattttttttggtagagacagggtttcactgtgttgtctaggctgatctcttgaaatcctgggctcaagtgatcctcctgcctcagcctctcaaagtgctgggattacaggcatgagccatcgcgcccagccagcaaaaatatttagaatcattagtttccgtagatggatcagaagtgaaaaggggcaatgaatgtgataaggaactaatacacagaattaatatctctgatatacaaagagctcttataaattattaagaaaaagataaacaccaatacaccattaggaaataattgaggacctcatagaatcagaagattcacaagcaaataaatgcaaatatctgctaagcaaatgaagatataagcaaccttacaaagcatcaaagacttgcaaaggaaaacaatgagatatttttcatctgaaaataagcagataaaaatattataatattgggtgctgtcagggttatagggaaatggccattctcttgagttgctgacaggagtgtaaattagtacaaccattgtgaaaggcatcttaaaattcataacaaaagcatttttttaaagtgcagatctattacctagcattttcacttacaataatttatctttttaaaaattcatgtgtggaagaattcagctactatgtttgcctcagcctttttagagtattggaaattataaagcacttatggatccaaaagtagggaattgcataaggtattgtagtacagccacactgaggaatacaacgcagccgtgaaaatcatgctgttcaagaatgttcaatggcacaggaaaaggaaccacaaccactctctccagctgggcataaaatggagctgatactcaccacgacataataggaattattcttcctctgtatttcccaatttttctgttgttgtttttttttcctactttcttaaaaagtgaagaggaatcttctggaatgtcagggactgtgcccacagtttgagacccaggaaaattggctcaacatccctgttggctgtagacccacatatgagccaaagcctcacccacatggcttacctgcctcagtttcccatatcaaaatctgagatgataatgcctgttctgcctccctcacaacaaatagaaaatatagctgtgttaatgttctgttgttgcataacaaattaccccaaaatgtggctgggtagttctggttcagggtctcatttggttgcgttaaagctgtcggccagggctgcagtcatctgaaggctcgactggggaatatacacttccaagctcattcttgcagctattggcaggaggcctcacttccttgcaggctgttggccagagacctcagtccctcacacctggtctctccataggctaagtgttctcactcatggcagctggcctcctctgagtggtgatccaggtgagagcaagagagcccaggcagaaactggaatcttgtgtaaccctggccacattctattagtaacacagaccaaccctggtgcaatatgggaggggactacacaaggcatgtatactaggaggtgagattacaggagaccatcccagggttaaagtgcttaacagggaaaggtgtgttctaaggggcagtcaggggctatccataagctcccaaagttctgactgtgcccagcttttttggaagcccttgagagcatgatggggcccacaggaatagtgaaccggggtgaaaagatcccactccacttgttcgctgagtgcagcatggggaagatttatatctaaagtaacagcaactatccctgagcaacttggtaatcgggaggtgtgtgtgtgtgtgtgtgtgtgtgtgtgtgtgtgtgtgtgtacttttttggtgtttttcaagtcatcttctttgagtatgcataattttctggtttttaaaaattttttgagacagaatctcactctgtcgcccaggctggggtgcagtggtacaatcatagctcactgcagcctcagtctcctggaatcaagtgatcctcccacctcagcctcccaaagtgctgggattacaggcatgagccaagtacatagaatgtttgtataacagccgggacatagatgtgcaccaccatgcctggctaatttttgtgtgtgtacagatggggtctcactatgttgcccaggctgatcttgaactcctggactctagcaattctcttatctcggccttccaaagtgctgggattacagacgtgagccaagtataatacacatcatttttgaagttaaaacagaaatgtctgaggacagtgaattcatctgactctcaaaagagactgcaagtgatacagtggctcagctttggaagtgaagaaatggtgcctctagaaccaggaagaatcctgttctgggatggagtggcctagggagaggtggagagggaggagatacatcaggcagcaaaccaggccccttaggttatgaggcagggacctgccaccccatgagcctgcccctccccacccccaccaagtggccagggactgcaggtgggatgtgagagccacataatgtgagctcggcgaccttagagcagcccctcacatcacagtttggatcagatgcgcctaatggggggtaccagggtgtggggtatgggttgaagatgagatcaggtgcaggtggatgtgaggacatagcaggcaggagaacccacacccccagggaaagggtctacaaacaagttgtagcttacaggggtggtgaatgggggccactgtgagtgctggaaacctaagccggtaggtgggtggtggaagtgcagagtctgccctcttctgcccttcagcagtaactgaaaggggtgtcatttggaatgtcagagttggaaggagcctcagaattgattgggatccatcaatctcttaaagatgagaaagaaagaggaggtcgggcacaatggctcacgtctatgataccagcattttggaaggctgaggtgggaggattgcttgagcccaggagttccaaaccagcctgggcaaccctgtctctacaaatgaaaaaaataaaaaattagccaagcatgcctgagtccggctacttgggaggctgaggtaggagaattgcttgagactggacagtcgaggctgcagtaaactatgatcatgccactgtactctggcctgggcacacagagtgagacactgtctcaataaaataaaattttcttaaaaaaggaaagtgtcttggccgggctccgtggcacatgcctgtaatcccagcactttaggaggccaaggcaggcgaatcacttaaggtcaggagttcgagaccagctggccaacatagtgaaaccccgtttctactaaaaatacaaaaattagccaggcgtggtggcatgcgcctgtaatcccagctactcaggaggctgaggcaggagaatcacctgaacgggggagacagagtttgcagtgagccgagatggcgccactgcactccagcctgggcaacagagcgagactccgtctaaaaaaaaaaaaaaaaaaaaaaggacagtgtcccgctaagacccacagcaccgtgggtgactaactaggaaagggactccagctcccaagagctgacaaataaaagaagggttgactttttcggtggacccagaagcagcagtaggagcttatggcaaaagttagaaggaggcggattttcatctcattatgaagaattttctaagtgatgggcacagttgtgagctggggttgactgggagcgggagagaggctgcgtgtgtgtctcgggtcctggtcggctcagttccctcccacagagtctaagagcttggatgtggctgagagtagcgcagccaccgccctctgctggtggaatgctggtagcacagctttcctgcttggccacgatgctgccctctggctaggcgaggctttccagagaagaagcaaccctttggggtctgagagctccctgctgggggcttcgggacggtgggtagtatatattctctgcacacatgtgcccggaagacagacgaggccatcagaatgcccgccagtgtctgtaactcgggactgaagccagcgaatgccccaggtgattgtgtgccctgggtcttcaggtgaccctgctgccccttcctgtgagcaaggtctccagaactgacaggtgggatggggcactggcctgggtgtctgcaaacctgggtgtggcctggcacagccatcaccctcttactcactgggtgacctcaagcaagtgccctccccaaactggacttgcactggcggtggggtggaagagtaggggccctgaccgccagagaaaggctcgtgggcagtggcttctccgtggagcacacgcgaagaacatcaaactcagcagtgctccatgacctcaccaggcagggttggagtaagagtttgccctgatcccaactaccttattccctctttctccctccagcctttccaccggtgccctcatgctcttttccctcacacctgccttcaggaatattctcaaagcttattcagaatgagtccacagtgaccaatattatctcccactacactctctttaggggtatttttattttattttgagagcagcaaggtggagcacgaaaggaatgaatccctaatagtagaacttcaggtatcagtcagctagagagtcagagattcttttataaggcaaaaagacttaggcaagaagaaagaggaactcttcccccttccttttgtactggtcagaccacaggctggaactacagtattgttctcagctccgtgagccacactgaaattgggaaatagagcagaaggtaatctgaagaaggcagccatgatggcgaaaatacttctagtccagcatgaattggaatgtttgtaccccgcttcagcatgctctggaattccccttgcggcagctgcctcccattttgctgtcagtcattcatgaggatttcacagtaactttgaggacaggaaacaagctgtgtcaattccctttcctcggtcagttcagcctctgcttgggcctttggagctgtctcttcctctagctcaccttcccagggaaagtaaagcctctgagggcaggaatagcatcttctaggcagaggaggggtatcctgtgtctggaaagaaatggggacttgaggaggtaggaggtgaagttgtaaattctagtttgagctttgccacttagttgctgcgtgatcttgagcaagaccatgaacccttctgagcctctgttgtctcatctctgaagttagggaaatgataactcctccacagaggtagtgagactcaaataagatgtttacagatctatttttgtaaaaccaaggtcatggagatcataacaagttagtacatatttaaagtgcttagaaaacattaacacattgtaggttctctgtaaatgttagctgcaattccacctcctggaagagagaatttattcacttaacaaatttttactgagcaccttctctgtacccggcactgtgggaagcactggggacccagcagtgaacaaaacagacaaaaaccccagccttcatggggcctacacgctagcggaggagacagataataaagtggattatagggtataatatagtataataatagaacagaaatggaatagaatatagaatagaatagaataatgctaggaggagaaattgattagggaaggggacaggggtgtgggcaggtggaggggtggctgaatttaaatacagtggtcagggaatctgataggctcagcttgagttagacgctcatcctggcccaatcagctgtgtgtttgtgtgtgcaagggcacagtgtgggcagataaggatatctgattggctcagcttgaattagatgcccattatgatccaatcagtttagcgtgtgtgtgctggcagtggcccacacttgtggtgctaacatgactgctagcgtccgcatctgtgggtgagggacataggagtcatgatgagctgcacaaaccctccagaggattctgaattgaagcaggacttctgcctcctggcccaccttagcctttaatttccgggggccaatctagcttcaggtcaccttcctcagctgtcaggactgaggtgccagagggtaaggggtctgcaaggataaccaccgccgcctaaacccgtcaaatgccagacacctccatacactgtccctgttcccctgtgacatggggctgctattctcagaaagctgcagaggcaggacttgaactagagtccatgagactctcaagctggagtgcaggtctcagccgtgtttcccaagtcctgctgtcacctctgtgctagcatgcgcacaccgcagccacctgaggagagtgtttaaaatgcttgttcccagaggccttgacctgactcaggaggtctagaggtggcccaagatctgtgttttttgtttcttctggattatttttttttttaagacagagtcatgctctgtcacccagggtggagtacagtggcaccatcacgactcactgcagtctctacttcctggatcaatggaccctcccacatcagcctccccaagtagctgggaccagaggtgtgcaccaccatgcctggctaattttttttcttttttttgtagagacaggtttcactgtgctgcccaggctggtcttgaactcctgtgttcaagtgatcctcccatttcagcctcccaaaatgctgggattacaggcatgagccacggtgcccagtccaagacctgtttttgcagcactttcgggactgtgctccccgccaggcctggagccccggaggcacaccctccctctcctccaagccatctgtcagtgctccctcttcctctccaaagcttgctcctctgcccttcctgcaaagctcccaattgaaccccaagccccatcactatatttgcagggtgcactgctggtcattcccactgggcctgagcagagactgcaagtaagaaaattccagaacctcaaaggtcaccccgcacaaagccccattgtacagatgatacagatgaggcccagacagggatagggctagctgaaggccacacagcagagggtggagctgagaccctctccctgtcatgcaatggctaaggacaagggcccctctctgccacagagaaagcatttccttgggcagctgggaggcagcttttctgggaaaggccagatggtggcggggggatgctgaggctgtgctccaggggttttcagggatttgcttggagaggcaaaggttacttgggagcggaccttcaaaacctccatgggcaggaagaaaatagctgtctttgtcataggccttggtgacttcgtgttgggaaattgtccaccctgtgccagcccctgtccattctgcagataaaacaaccctaccaggttggagggttcctcacccactgcccagccccattctgtgtgtctgctgcctcccctctcctgatatgtctgttcctgccttcaccctctccttcaccatagctgggtggccaagtcccctctactgtgtcaagaacaggtcctgatcccctggttcagccagccacaggctctctgcagccatggaaaaacatgaacgttggctggattgagggtttcctgttatttcatgaaaatctcctgcctctcggaggcctggtggggcccagccccctggcccaggaggctgccttgcccctccataattaacaggagctctcctttcccctgcaaggtctgttgcttcctgacaaaggcctaacatgcacttgactttccccccagatgacttgtacagcacccgtgccactggccgctggctgttcctacaacactggcggggttaggacctttcccactgagtctgggaggacagcagacccaggtcctgttgtcagagaaggagtcaggcagaacagcctagcactccatagtaagagcagggggaggaggaggaggaattccccaatttctgtgtcagtgtgagccctttctcccctccctcacactgagcccccagaagggtgccccaggcctgtcgggcaataacagagaaaagacagcaggcggtggttcacacctgtaatcccaacactttgagaggccgacttgggcagatcacctgaggtcaggagttcaagaccagcctggccaacatggtgaaaccccatctctactaaaaatacaaaaattagccaggtgaggtggtgggtgcctgttatcccagctactcagtggactgaggcaggagaatcatttgaacccaggagacagaggttgcagtgagctgagattgtgccactgtactccagcctgggcaaaagagcgagactccacttcaaaaaagaaaaaagaaaacaaaagaaggcagctgagcgtgtccagggatcagcaggtggcatagccagcaccaggctcagaagagctgcccacaccatgtcccctgggagccccaaactcaggcaccacacacccaaactccagccttcattgccggtcctccagtgctcagatagggaagaactagagtagaaaatgtagccccaggttactggacagatagtggatctggctagaggccaggggaccgctgtactcagggtgtgttcccctccctgcccctccagcagcccaacttggcttgacagtaggacccagtccctgacctggccctccgagctggtcaggcagagtgagggccttcccagaaatatcacctgcttctcactcgtggatgagttcagtagatatttattgagactctactatgggcctggcaccgtgctgggtgttgggatacagtagtgactaaaacagacagaatgtggtggaagtgacatccaagggaatcatcccatcttattcatctctaggtggccagctccaggcccagggagggttcttgtctgtgtttggtgagctgggtggagattcaacatataaccccagactggcagagctggaagggccctgatggttcaggtccactgtgcagacactttctgagcacatgcaccggggcagctggccatgctaggcctgtacaaagatgggttagacacataccccacccatggaaagctcacccttggtgagggtgacagccatgacagccattaagcacagtacaaaggagggtctggtccgaggggctgtgcagagcacagaggcagagggaggaagctaacctgcattttgcagatgataataataactaccatttatcgagtgcttctgtggtgccaggccccgtgcccagtgagtttgtatttattggctcatgaggaaactgaagccctgggaggaaggaacttgctcagtcagtcattagcgtgagctgagccaaagtagaccctgacttctaggggttcggagtgcaatatgttccttctcccactaccccagcccctgaggatcaaccaacctccacagatgcagcagagagaaagcttgggatggggagggactggtcatctcagcatggggctgttcacttacaatgtaaaggacattttcaaggccatagattcccagggtcattacctcggaggtggtgcatctccttctctggccccttacatatccctgatggagcaaggctgaagttctgagccagaggtcccctgccctgcccacagattccatgacttccatggggacagtgatggcccagggctgagtctctatggtgtctgggcagggaagatggtgggcactgggcccccgcagagtgtgcacgctcttggtggatggcggttctctcggtggctatccctaagaggcaaggcagagtggcccagcctgggagcatgtggatggtgccatgtgactcactcccacttcaatgacaacagtatctttgcagctggcagcatgtggctgggggagtcatttgatcctgaatatagactggcattgtgtttgagaccagagggtgtaagaagcatgtctgtaccactgaggtttcattcatgtctcacactctgctggaaaccctccatgattatctcatttaagatgaaagtgtggataatctcttgggagggcaacaaacacccgtgaaataaagcaaacaacgcaagacaatgctaaatggagaagcaggacagtgtcatggttaggcccagagcacaacagaaggctctgcaccatgcaaatggtacccccttgagttgtgcagtgtacagtccatgcaactgtacaggggatcctgattaggtccaccgtctatggcatcattaattcaacacaatttggtgagagcttaccatttgtgtccagcacgattccagacactggggttatagcagaggacaagacagagcaccaccctgcatggagcttacattctaatttgaaggtcagaaagactaagggttgcatcctggctttgccgctgtgttagttaatctcactaagcttcagtttcctcatctgcaaaatggacacaatgacctgtacttcgtaaggttattgtgctaaaaaattgaaataacacttggcttcaggtctgacccatgggaagccctcagtaaatgacagccagcatgatcacaaatgctgtgggaagaagggcttagaaaagcttagggaaaaggggccgggcgcggtggctcacgcctgtaataccagcactttgggaggctgaggtaggcagatcgcctgaggtcaagagttctagaccagcctggccaacatggtgaaaccctgtctctacaaaaatacaaaaattagccgggcatgatggcaggtgcctgtaatcccagctactcgcgaacctgaggcaggagaatcgcttgaacccagaaggaggaggttgcagtgagctgagatcgtgccattgcactctagcctgggcgagagagcaagatctccctccatctcaaaaaaaaattttttttggaaagaaaagctgagggaaaaggaagaccacaagatgtgaagtgcactaaatcgtctcagtgggagcaggagttggggcgtctcttgaggggtgcagaagcccagaggagcaggcctttctaaagaccgtgtcacaaggaatgcagggagggggccagtgaggagcccctgatttgggggccatattttcccaaaccaagggttaggacacccatgatctggcagagaagttctgtgtttcttccagagaagaagtctgggaaaaggtggtcatccaaatattgggattgggggagataatcaccattttcataggacctgagacatcacatttaaaattgggtctgtcacacttgagaagtgtgacccctgtagggttgagcaaaccaaagaataaggttagagggcagttgggggtgggaacagggtgtgcgtgcccctcgagggccaggcaggtaagtcagatctgataagacagagaaaggggagctgactaagtcaggattcctgctgcacactggctgagtggcccaaatctctgtctctaggtctcagtttctgtctctgaaaagcggagacattgttgaggagcagagataacacagatgtagttatctgttgctagcaacagaaatcacccccaaccccagtcctcttatgcagaaagggtttaggggcttcatagatttaaagggctagagctgggacagtggagagccagacttggaaccagatcagcaccaagacagctccggagggcccagtcccagcccaccctgggtaggagtctgattggccaaacccagtcccatgccccgtccctggatagcagaggaccctgggtaggaggagcccctgcttcagctttcatggtagggcactgcatcccaccaggacagcccacagagggagagtcctccaaatcaggaagggggcttggatgcccaactgccaaaaaatcctgcagatagttatgtatgccatggaagattctggaagagttgcacaaggaaagtaataattatagaaagccaatcttgctctggagttcgagaagagaccagcaccgtggagaccaattagaagactggagtgcctcaggaaggctatgggcagggtgcacctggagaggaaggagcagatgtaaaggcgtttgtggggattaacccatcagaggcctctgggaatcctctctgactacagagaggtacagggagtctcagaggcttagcaaggggctcaggatgtttacagctgtcagggctctaagagatcacatggccacagattgacattctctgatcgactggtagggactccctagatgctgtgctgaggactgctgggctcaggcaggactcagtgagcgattggtaatgcctgttatagatagagaaaccccaggaggggcaaggataccatgtttattatccctgccccccaaaaatgcctcacttttcggagggagagactgagacctagagagacagagattcaggccactcagccagtgtacagcagagctgagatgaaaacccaggtcccctgaatcccagagtgctgccctgctgctgtagcagtgctttagtaatgctccccaaatcccaggtgggctgggcaaaaatcacaactcaaaatgagtttcctttcacactacaggagaggtgtgtggaattggggtgttacaggaagggcacctggtgggagagtcctcttttccctcctcgttccttgggccaaatggcgaacagaaggaggggtttttataattttggcagcggcccatgcacacaggagaagttctggtgggtcctctattgagagggcccctggtatggcagaaacccaggcctctgggccaaaaagcgaagggcagacttaggaacctgctcctgaccttgacggagctccacccgcccagggtcctccatgcctatatctctctctaggccacccccagttgggatagattcctctagggaggggttcctgatgttcaggaaggcctctggtggggagcctgaaggacgaaggctgtttggggtccagccatgggaagatactgaagaccccagagctgactctcttgttggtccagaccccgcgtccccagcactcccacctgcttggagagcatggctctgtggcgggggaggagaaagccaatgctagtgatgacagcctcgagatggtgcaagcactgtccttttcttttgattttctgcctaaaccagaaatgtgctttttccacaatttgcatagatgctgtcatgtaacttttttttgccactgctcgcatttccaacagttacagttttggtgcaccacccctccccccactgtaggatattgagacatcatggtgggactggatattgggagcctcaccttccctctgcagtatccctacccatcatatttaaggcctcgaatgctgggaagcagggatgtcaccatctcaggacacacctgcctcacctccctccctgcagagcatgttctacctctcggcaagagagtgtggccttggtcaagaccactgtcatcatggtgctcacagcctggtggcagggatgaaccaggaaccaaaggtccctcagtgaggaaggagcattggaggtggaggtgtataaccatgggcatggcatgggcagtagactgagggagagtgtcaaggcaggactgtgctgggatgacaacagctctgatgcctggataaggagtttggcttataaggtctagatagtagggacccattgaagattttggagctggggagttatttcatcagagctgcatcctaggaaaattaggcaacagtgtgtaaggtggattggagagagaactgaaaagagcagacattacagggaaggagataaaccagtgggcccacttcagaaatcctgccagctctagagtgaataaagcctttgactcaaaatagatgtcctagaagtctgcctgagagtctaaaaaccccaggagattacacttttgggccaagcagctttctctaaaaggctcctgtcaatatgtacatagatgacccgcaaggagaaatggactaacccaatgtcccccagtcctctttggaaggcttttgtttacttgattaattggccaaagcaagcagggtcctgaaataggggacatgagacaagtaagtcttgattgggatggagggagagaaagaacacagccagaggccagggcagaaaggaccacaggagaggagcttgtatggcacgtacatatgtgtgtgtgtgttcacttgcacatgcaagcatatacatgtgtatgttgcggacagtcactggaaaatagggaacaccctgcagtggagcaggcagcactttggatgaaggacatccatgtttaggaacatgagaccccctcccgcccctgcatatgcagggctctgagcctgcataaactcattctggttctgtcactgccaagtggtgtgaccaggggcaagtgtccttatttagtttatctgggtaacactaattaagataatgtctgtgcaagtgttgagggttgtgcaaatgtgagttgggggcaaagcctccttcaggcccgggagcctgggacacagggagcccgatctctgcccaggactctgggggagaaggactacaatacctgttttataatgactctctctcttttaatatcaacttccagtcatagaagagagagccaggaagactataagcaacctaatcagatggtctggaatgcatggggcagcacacagtgagggaaagtgatgataggggtggcccatgaaaaaacatctttcatactgaggcttgggattccagcagtaaatcacccatctgctgggttcagcatgatccactgccctcggtactcctttacatgctcatcacctaatgtgacttctgtcttcctatttgctttacctgtggtttctacaaataagcctgtattaaatgtgcatgataatgttcttaattttgtttcgggagacagtcttactttgttgcccaggctggagtgcaggggtgcaatctccgctcacttcaacctcctcctcctgggttcaagccattctcatgcctcagcctcccaagtagctgggattacaggcacgtgtcaccacatccagctaatttttgtattttttagtaaagatgggattttgccatgttgcccaggctggtctcacactcctgaggtcaggtgatctgcccaccttggcctcccaaagtgctgggattacaggcgtgagccaccgtgcccagctgataatgttttgaattgctcaccctccccaacatgagacaagaccaaccttcagctgctgactcttagaatgcacaagtatttcaggtgctccaggaggcaggaggcccaggccccagcaggctatggagcctctagggtagtggttcccagtctttgctgctcattgaaatcaatccgggaaacccattaaaaataccaatgcctggctcctgcctctcagatattgggattaaattgatatttaattgtttgattgattaattaaacactttattttattgataatttaactgataagttgatattgctcactgggcattgggattacttaaactcccaggtgattctaaaatgtagccaagtttggcaagctctaggcggaggagagagacagggtgagaaaaagagtaggaagggagggtctccaagaacaaatctaaggggcttcgcaactgagctgccgccgaccccttgtgggaaccgcactagaaatgttgagctcctacttctgtttttttttttttttcttttttttttttttttgagacggagttttactcctattgcccaggctggagtgcaatggcgcaaccttggctcattgcaaccttcacctcccgagtcaagtgattctcctgcctcagcctcccgagtagctgggattataggcatgtgccaccacgcctggctaattttgtagttttggtagagagggggttctgtcacgttggccaggctggtctcgaactcctgacctcaggtgatctgcctgcctcggcctcccaaagtgctgggattacaggagtgagccaccacgcccggcttcatacactgatttctaatgactttcctccctgatttacttggtgtctcatctacatcctgaaacagaagccagcatagcagagatgccttagaggcagacagccaagtgcagatgatagctcctcacttcccagacaagtcaccttgggcaagtcgcctcccagagctcagtgtctcatccataaaatgaactgttaccagaggactataaggatttaataaaaccttatagggttgttacaaggattaaatttttaaatgtatataaattgcttaacacggccaggtacagtggctcacgcctgtaatcccagcactttgggaggttgaggcgggtggatcacctgaggtcaggagttcaagaccagcctgatcgacatggtgaaaccccgtctctactaaaaatacaaaaattagctgggcatagtggcacatgcctataatcccagctacttgggaggctgaggcagaagaatcgcttgaacccaggcggcggaggtcaccgtgagccaagatcgcaccattgcaccccagcctgcgcaacaagagcgaaactccgtctcaaaaaaaaaaaaagaaaataaaaaaatgaaaaaattgcttaacacaaggcctagcactttgcactcactcatcaaatagtctttggttatcactattgtcttcttcacggttgttctggcattgccatctcacatctttctcatgtggactcaatatggattcctgtgttctgtgctggtacactggaagcatggcactctgtggttgcaggtgtgtcttgcttcataaagtaaaaaggggagccatgaaaaagcagcaagggtatcagaccagggtctgggaatctgggaagcccagagaggccaggggttatgttcaaggtcactgggccagtgagtgccggaaccgggtgtggaaatcctacctcctgctcagtctgttctttctgcctcgctaagctgattctctaggtaagaaaacattttgcttccatgtacaaaattcagctctgcagtgatgggagaatctaggaagctgaagctgcaatgcaggttggtttgaaactgtctcatccccagtcagttcactgggttcagataaatcctggacaggggttgagagtacccactgctcccctggacagcctgctgggtgagccacacccgtggactcaccatgccgccagcctttccaagggagggcccggccatggctgcctgagtgcatgccacacacacacactgaaatgcactttcaattaactatataattttatttaatttcaaagatgtattttccctggtcttattctgttttatgttgctgggcacatttacaataaacagaaatttatttggtttacggttctggaagctgggaagtcaaagagcacgatgcaggcatctggcaacggccttcctgctgtgacatcccatggcagaaggtggagggcaagagagatagagcaagagaagaccaaactcacttttataacaaacccactcacaagacaactaacccactcccaagataaagacattaatccatgcatgagggcacagccctcatgacctaatcacctcttataaccacttcccaacactgtagcattggagactaagtttccaacacatgaactctggggaacatgttcaagccatagcaccctccagaccatccattggtaacaagggtgtagagaaacctgtatgaacaaatacattgatgttgcacaaaagcttttgaaacttgcaaatctggtaggcaccagtctgcatattatttcttcaagaactgtttgcttgaaaccagagaggaatatttttcaatcaaggctatgggaggtgtgttttttgtaataatatctgtttttttaataacaattttatatgtttgttagaattggaagctgctagtaatatccaactattcagatgttgtcactattagcattctgatgtattttcttgtagattggtttttttagatacggatccttttatatgcaggttgagcattctaaatccaaaaacccaaaatccaaaatgctccaaaatctgaaacttgttgatcaccaacatgatgctcaaagtgaatgctctttgaagcactttagattttggattttcagatctgggatgctcaaccagtaagtaaaatgcaaatatttcaaaatctgaaaaaaaaatcaaaatctgaaatacttctggtcccaagcactttggatatggaatactcaaactgtatagaacttgattctgttttactaagcgtagatctttagcaatgctcatgccattaaatattctttgaatatatgatcttaaatgacctcagaatattccattatatgggtgtactgtaatttattttgacaatgtccccattgctgtccctatgataaataacatggcagtgactgtttcagtgtgcttctctgttgatttccctggggtaaattcctgaagcagaattattggtcaaaggtcatgaaccttttaaaagtgttggagaggttctgtcaaatggatctccggagaaggtgccctacttcacactcccactcatcctggagcagggtgtccatgcccctctcctggggctggggatcaggttgtatctcaaagacaccctatctgccaataactctgtctgttggcattggcacacagggtgtatttgagatacaacctgatccccagccccgagctcttccttgggaagactcagggtacacaacagctgcgattcaacatttgacattgaagttctgtcccagcaaagaagggctggacttgttctgtgagccctccaggataatgcccacaagaacagggtgaagatctccctaagggttatagactccaaagaataggtctcttcctccaccctccaccccaggcagcaaggtctctgccccagctctgttgagactgaagttctctgaggttctctaaccagatggcaggttagagccctggacctccgagaaccctacccctgggacaattctgtgagccgaccatctaaacagtcattgtacagtcatggaacattgaaaaatcttgactccatagaagctcactaaatctctgttttcttagttgtaaaatgggcttgttatgaggattaaatttgattatatttgtaaatcaatataaatgtgtttatattaatatgctattatattatcaatagccatgtgttagtgttggtgttagtgtattagtgtattagtatgaagcatgagaaaacagtattgtgtagcagttaggagccaggcttcagcgacagacaggaccaagtttggtctccggtcacaccccctgtacagaaacagtaacttgtacaacagaggcatatgtgggacttggggagaagattgctgacattttttaaaaatttacaatcagcttcctttagaacatttggcagaggcattttgtttgttctttaatttttatgtttgttaaagtaataaatgtgcagaggtcagaaggtctaataatactctacagcctgtagcactgcaaagtgatgtgctggggttggcttgtgttggctcgtgagagcctactggtaaaatttttaggaatttaggagttttgcaagctggttgttaaacagagccattattataaattacattgaataaacttgcaattaagttatagtaaaagcagaagtactaaatattaaaaatgtattacttcccaattatttcactattatctgtgttcttgaggttatctgtgactattacatttgcagagtggaaatattctataatagtgtgctgagagcctcttctatctctgtatttggtggcattagcctgaaatcagtgatcgtgggaatatttacaccaccaaaattggcaaacgctatgaatcagggcctttttttctctggagacccagttgttaagcatctacagcccaccactgcctagagccacaatccctgtcccgtcttgtgacacccctgcatttcctactctggttttagctgtttctttttgcacttacccccatatttcttaattacatgcctttaccactgcatcttgattttcaaatattagacatggcctactggctccctattatggaaaatgaggctctagcttttttccagctctgtctcccttcttactacgcacacatacacactttcctcgcctctgtcttcccagtacagcatagcacaattcttgcttaagatataaatattcaggttttacattattacaatcatgtaaatattgtacataaagcattaagcaatgtgatcacgttagctgtctttttttttttttttttttgtgagacagggtctcacttggtcatccaggctggaagagagtggcatgatcatgatttattgcagcctaggcctcctgggctcaagcaatcctcccacctcagcctcccaagtagctgggactctaggtgtgtgccactatggctagctaatttttttggtatattttttgtaaaggtggaattttgccatgtttcccaggctggtctcgaactcctgggcttaaacgatccacctgccttggcctcccaaagtgccaagtgggattacaggtgtgagccactgtgcctagcctacattagctttctcagacaacatgttttcttggagttaataattgcatttttaaatttgtttgatgtctctatagaaaactggttttcggccaggtgcggtggctcacgcctgtaatcccagcactttgggaggccaaggcgggtggatcacgaggtcaggagatcgagaccatcctggctaacacggtgaaaccccgtctctactaaaaatacaaaaaattagccgggcaaggtggcgggcacctgtggtcccagctactcgggaggctgaggcaggagaatggcgtgaaccccggggggcagagcttgcagtgagccgagatcgcgccactgcactccagcctgggagacagtgagactccgtctcaaaaaaaaaaaaaaaaaaaaaaaaaagaaaagaaaagtggttttcaagctttttttttaagcaatggagctcatcagtctctagaaagacttgtctccttcccgagtgcagggctctggccactccttcttctaaacaggctcctctctgttctgaataggttccggtgatgttgcctaacctgcccctccagtgtatcgcccgtgggctgctggctagaagctcctgttatctgatggccacctattgactggttcggtgcctttcagatttgcctgggctgggctgggtgccaaacacttaatgcacacagctctgctcagggaacactccaatgcagcttttgcgatcagatggaaggaatgactctgtcagagagtaagtgagctgtggaagcagatgatgcagggcctgtctgcccatgaaaagtctgagctgcaggaggggagctggctaacaatgaccagtagggttcaagaacactcgcttttgagaatcacacctgtgtggaaatcccggctttgctttcagctgcttgaccttgggcaagtagcttaacctctctgggccttaatttcctcatacctaattaacagggttgtttccagagttaaagataacgtgcgtaaccctaataaatctgagtcacatgtgacccgcctctgcttagagtctcattttttaaaaatcatattcagctgggcgcaatggcacacggctttggaaggccaaagcaggcggatcacctgaggtcaggagttcaaaaccagcccagccaacacagggaaaccccatctctactaaaaatataaaaattagctgggcatgatggctgacacgtgtagtcccagctactcaggaggctgagacaggagaatcgcttgaacccgggaggcggaggttgcagtgagccaagatcacaccactacactccagcctgggcgacagagtgagactctgtctcaaaagcaaataaataaaaaaaattaacattaaaatttaaaaactttccttttttttttgtttttttgaagacagagtctcactctgtcgcccagactggagtgcagtggtgtgatatcagctccctgcaaccctcgcctcctaggttcaagtgattctcatggctcagcctcccaagtagctgggattacaggtgcccaccaccatgcctggctaatttttgtatttttagtagagacggggtttctccatgttggccagactggtctcagactcctgacttcaggtgatccacccgtctcagcctctcaaagtactgggattacaggcatgatccaccgtgcctggcctaaaaaattatattctaacagcccaaaagtaatttaaaatatattccaaacctaactgcatctttcatagaatattgaaaggaagcccatttgtaactgatatcaacgctctccaaatcctttttctctatcctctaattttcccacaacatacaacatcagtgaaattctcctgggtccagcctctgaggcttttttccccctctctttctctgcctcattctgcatcttccataccactaccattttctccagtcctgttttttcctctacccatcctgccatggctctgttgcaaaagatcaaacgatctggaaatgagccgatagagatgcaggcaggaagtggtggggaagaggtcacagcaggacacatactctgaaataactcttcttcatctcactgggaagtgccaggcatgtgcagtagcaagggcttggcagaaattggttctcctcctccttattattctgatgaggaatctgaaggagacagcggtataacctcctagacttccctcttttctgaccacctacccactgttagcagatgggccgtaactggagaaacttccttgcctcctttcctccaaactccccaaaaaagtagcaggaaaaagacctgagagatggaagcatagcttctgcctattccccctcccttctctgccacctttgtagccgctaaacatggaacagctcttccacacccatccacgccccttgttccatccgtttgtggactcaccccctcccgggaagtcatggactgagcacctactgggtaccagacctgtaaggggctggagattcagagacaaggatgacacagactctgtcctcagttgctcacagacaaacagaaacaaactgcaaatcagatctggttgtgatttgtttgtttgtttgtttgttttgagacagagtcttgctctgtcacccagtctggagtgcagcggcacaatcttggctcaccgcaacctccgcctcctgggttcaagcgattctcctgtctcagcctcccgagtagctgggattacaggcgtgtgtcaccatgcctgcttaatttttgtatttttagtagagatggggtttctccacgttggccaggctggtctcaaactcctgacgtcaggtgatctgcccgccttggcctcccaaagtgctgggattacaggtgtgagccaccgcacccggcttggttgtgttataatggagggaagcacagaatgctgtgagagcacagaggaagagatcttcacccactaagggatcagggaagactttctgcaggaggtgtcatctaagctgtacaataataagtgctgtcatatattgagcatttactgatattctcttcactaagtgctttgctaagcatattagctcacataatcttcacaacaatgctaaaaagtagacattgctattctcattttagagaggggaaaccgaggctcagagaagttcattaactttcctaaggccacaactttcactgctaaaaatcagcagagctgtaattcaaacacaggcctgtgggactccgaagactatgctttcaaccacagggcactgtgtaccggtgttcaagatgtacactgcagaaggacgctcattcatatcgtagagagaatggctcgtgtaagagtatataggtggacccagagattcaggcctctctgctgactcccagagcagcaggaaagagcctcctcctgatccaaagctgactgtgccctgggggaagcagggagtgtgggccccagggagagtaggtacacccagcatctgagcgtgcgtgaacgaggcagatcgtgggcctgtgtgtgtgccaccagggctgctgcccatcaggctggtcactccagtgggtagtaacagcttaactttaaacacttttacttgatgcaggggcaccttttcctcatttgcagaggtgtatatgaacgagcagcagcctgtcccaccatggctgtgtggcccccctgaaccattcagtcttggggaggacacagctgcagagcagtgtggcccagcctgacttggcccagcagggcccaaagacaaaaataaaacacaggtgattcctcaaggaccttccagtccagttgagaggcccagaaaaaaggtgctccattcaaggccaccccagggccatcaaactaatctccttctctctctctctctttctcctctgcagacaggcaggattgaacccaactaccccaaggtctgcggccaccagggcaatgtgctggatatcaaatggaaccccttcatcgacaacatcattgcctcgtgctcggaggacacgtcggtgagcagaggggtgctcccggaggagggtgggctcaggcccctccctgcttcctttggaggcctctcttcctaccctcccctcctccaccctttgcccttcttccctcctctttgtcatctttccagcaagccccacgatgtgggggggatgggagctaggaaagaaccaaggcagcaaatccctgctggattccagagatctgtgttttcagtgtgattgagcttggaggtgttgcttttgtaggtgagaattagaatttaaaaattaagcgtgtgattcagcatttgtctatgctgtctaaagaagggcaagggaaagaatatgaacaaggagggagggagaaaaggaaggaactggatgggcatgaggaaaagagcgcctgttctttgcaggctgggcagggtaaatgtaccatctggtttgtcctctctgagtcgtggtttctaggaaaggagacttagctgagagaagtgtcctgatttttccaaggacccacacaggtgacccaaaatttgaactccatgtgtcccaccattcaatgagaagagagaagaaacaggagaagggagataagtaagagagatcagggaggagacagagagaacagggagagaacagataggagaaatagagataggagggaaagggggaaagagacaatttagagagggggataaagaatccagggtaagtggcttgggcacagtgggttcacgcctgtaatcccagtgctttgggaggccaaggcaggaggatcacttgaggccaggagtttgagacagcctgggcaacacagtgagacccccgtctctacaaaaaattgaattaaaaaaaaaaaaactaggtgggtgtggtggtgcacacctgtagtcccagctactagggagggtgaggtgggaggatcacttgagcctggaaggtcaaggctgcagtgagctgtgattgtgccactgcactccagcttgggtgacagaatgagccactgtctcaaaaaaaaaaaaaaagagttcgagcatggtggcacatgcctgtaatcccagcacttcgggaggctgaggcaggtggatcatttgaggtcaggagttcgagaccagcttggccaacatggtgaaaccccatctctactaaaaagataaaaattagccaggcgtggtggcgcacccctgtaatcccagctattcggaaggctgaggcaggagaatcacttgaacctggaaggcggaggttgcagtgagctgagatcgtgccactgcagtccatgcactccaggctgggtgacagagcaagactctgcctcaaaaaaaaaaaaaaaaaaagaatccagggaaagtgaaatttgaaactgtgttctggccactccttcctcagactctaccaactttcaccagtggaggtagggtcagagggcgctggcagtggccttccagagggagggtcccataatgtgttccacactgtccctgagcagcatcagtacaccagcttggaagaaagaggagatttcagagcctcagctgagctggtgaggagggcctggtgttcccagatgaaggaggatcagcctaagcccctggtgttcccaggcaaaggaaaatcccagccttttagtcaggccacaagcatctacctggtgctcactggcagagcctgggtaccggtcagattttcaggaatgttggaatgggaaggaacttcagagctcatgtctccctgtcttcccagactggactgtgagctcctgggagcagagaccacagcctatttggttctgcaccccatgcatccagcacagggcctggtacctaataaatgcttagtaggtgctggatgggatcgatggatgcatggatggatggatggattgtggatggatggatggatggattgttggatggatggattgttggatggatagatggatggatggattgttggatggatggatggatggattgttggatggatggatggatggatggatggattgttgggtgtatgactacattgatggatagagagacgaatgagtaaaattgatgatggatagatgaatgaatgaaagaatggataagtaaatagatgactgtatgacaggtgggtagatggatgaatgaaagataaacacatgaacaagtaaattaatatagtccatctaatcagttatccaaagaaagaaagattcacagtaaatagcctccatcagttcacacgctgggggtgaggtcagctggcacagtacctagtacatgggagagtggtgaggaggtgactggaagggtggagtgcacttgaccagcccatagtccatcacagagggctcctgagagtggcagcagtgaaggcagtgcccttgggagcagagagagcaagagcctatagtgaagatggtccatcaggcttcagcagcccagaaccaaattagggacagtggtcaggggtcaggacataggcaggccagggctgcagaaggaagggcacaggtgctggagctgggggacacagagagttcaccggttgcttcctgggctgggaaagaggcacaggagctggtggaggctggagagcccagtggccagcacaagaggcctggggtcagtgggagagagggcaggtggaggtgctgcccatccttctctcctgggttcagggagcccaagaaggaatgcggtgaccacagctggctccgtccctgcctgctgaggtgctgggagagtggcgggaagggctgaccccagctggtgtcaccagccagcaggtagtagcccctggaactcagggctgctcctctacccactctgggatgggcctttcacatacatttagctcttagagccactccatgagacaggcactgccacccccaaactgagggttggtaggtaggtcacaagccaggaagtagaggagcagggattttacctggcctgctcgctgcaaagcccatgctctgccaagcttcctcatcacagacagccaatgctgtctcccagtggctcatgtcttacccagggacccagctaggataacagatgagcagtgcctgtcttgatgtaggggggacaaattagaccagggctcctggaatcactggccacccaggttcctcctcaggtctcaatttctcctgcctggctcatggtgagaaggatctgaccagtcctagctcggcgtcttatttaacctgatatgtgcctcatgctccaggaccccagcttgtaaacaagacatccatggtttgtgtccaagaaaaacataaggctgcatccccggccacatgagccaagagactctgttcagttttgcacacactgactgacagaccacggtatgccttgcaccaccctggctgctggggtccaaagagggatctggtagacctgggctggaatctcagcttcaccatttaccatctgggtggccaatggagtgttacttggcctctctgagcctcggttttgctcgtctctgaaacagtaagatacctccctttggctgttgtgatgaggatgaaggttagcctatgcccagtagtatgcctgtcccttcatcgatgcctgctcatctcactcttgctctggaaacacccctagtagaggcgcagaggggcagggcccaccccacccaccaaaacgtggtgcagaatgaggtcattgcatccaccaaggtcaagcaaagggctatgcacacagagaagagagagagagattagttttgaccaaggtgcagagaggagaagaggtagttagctggactttggagaagcaggacattgacagacagaaaaagggttagagaaggagtcccaggaagagacccagtatatccggtgtgcttggcctggagagaatgcatatacagtgcgcttagaaaagggagagtcatctggtgtgactggagccctggggtggtggtcagtgagaggagcgggcaggaagggcagctgcgaagggcagttggacccaaggagagaaggcttagggttcagggtgagcagcccaactttgcagcgagacttgtgcttctcaagccatctgagcatcagtggaccccaccgagtgtggtgcatgggagacactacacgctccagggaaccaaggggacctgtgtggatggagggggtcacagacagatttatggaggacatggggcctgaactagctggatacaggtagatcagtggagagaagggaagagcggaggggtgtggctggaggagtgaagggaagggacacgggcttggggcacaggaagggaggggctggcctgggctgctgatccagagacaaggagattaagtctggatcagagaggaactaagctctcgctccagctgccaggccagctgccccagaagtacagccctgaaccgcatcttacccgggtgtccacccctccccgccttggagctagggatcttggcagtggaaccaacaggttcctgaggctggatcccaacctctcctgaaggacgtgctctgggaccctaagggaggtgccttgcccaaggtcacacagggagcctttgtcctaggaaggtcccctgactcccagtctgcactctcagcccctcaccagtggccctggttctacaagggaggaaactgaggctcagggccatggtgggctgggctgacagttcagattcatcacgctcaacatttacatcacagcgtctgctctcctcagggtccaacctgggtgctgggggaaagcacaggagaggcatcccccgctgcagcctgggagggggtggggcgtaaaggaaatggagtttgcagcttccagggggtggacaggaggtcagcactgctgccagggcccttcccacggcctccctgcctccttcaaagcacctgaggcatcggccaccgaggccctccctccacccattccagctggaatggtcaacttgctgctcaccagacacgacatccagacccaggcttgggaggtcagtcggcaaagctgctgtgtgtgccaggcactgtgctacatacagggctggggacggcgccaggccacaggggcccagagggaagctcttcacagcaggtctggaccagttcccctggtagtgcctgcctgtttcacccccagccctccacttccctctacttgtctcaaaacattcagaggacactggtgggatttcacgagccctgatttccccagctccttccccatatcccccagccctgcaacctccagtgaaatcaatccccgtcccccaggatccgtttcccctccctgagcaggaggaggtcctctggagtctatcctccatcccgccagggatccagcagaacatacccaggcccttccccaggggctttgggcccgagggagggctgggggccataactctccctggcatctggcagaatccagttctttccgctgctgggtgatgtcacctattgttgaaggctatgctttttatagcttctgccgcagctagggagggcggctggcaggcggcagggaagggcgctatcggtttccaagcctcgtgctcccagcccttctcctggggccagcagccgcggagagagagaggtttctgtcatcttaaggagagggagagagcgatcccaggagagagggaggagggagaagaggcaggcgcctcttgctggtgggccgagctccacatctttcctttgccttttattcaagctcttccatcctgtgtctgctctcctcaccctgtagatgatgcccctccctgaggagctgggggcgggatggacaggatgtcagccctgctggaagccacccaccaccctgcctcctgcacacccccacctcccgagctccggaaccaatacctcttggagctggaagggagtgatgcacttttgtagaaggaaggtagccctgaggggccagtgcgctgagtgggtcttcactaatgatttagcagccacagagaaagcagcagtatggctccctggctaagcagccaggctcaggagtcccttaggcctaggttcaaatcctggctctgccacttccaggctctgcgatctaggactagtttcttttttttcttttttttcttttttttgagagacggaggctcgctctgtcgcccagtctggagtgcagtggcgcgatctccgctcactgcaagcttcacctcccgggttcaggccattctcctgcctcagcctcctgagaagctgggactacaggcgcctgcaaccacgcccggctaattttttttttttttttttttttttttgagacggagtttcgctctgtcgcccaggctggagtgcagtggcgcgatctcgactcactgcaagctccgcctcccgggttcacgccattctcctgcctcagcctcccgtgtagctgggactacaggtgcgcaccaccatgcccggctaatttttgtatttttagtagagacggggtttcatcgtgttagccaggacgatctcaatctcctgacctcgtgatctgcccgcctcggcctcccgaagtgctgggattacaggcgtgagccactgcacccggcctaggactagtttctttacctctgagtaccagttgccctattgtaaaataggaatcatctcgggctctgagaactagatgaatataaaagtgttttgtgtcccctaagaactccatagacattaactgttactttcttttccttaagtgagggcccaagagtttaaataacttgcccaggccgggcacggtagctcacgcctgtaatcccaacactttgggaggctgaggtgggtggatcacctgaggtcagcagcttgagaccagcgtggccaacatgataagcggaaggacagatcatgtcctcctcagggggttgggtccagcccagggaagaaggaaaaatcaggtacgggcacgggcaggagtgtggaagagaggaggagggtagtctgcctgattccaattctgagtttgaatcccagctcctcctttcctagctgtgacacctgggcaagttttctcacctgtgtgggcctcatttccttatctgtgcaaggacagtctttagtagtcataataataataggtagcacttattctttcatgcatccagcgccacaacgaccacttcatgcatcctctagcaaccccctcccaggactcacagcagtagatgctcaacaatgcttccttctgggtcctcagttcgcccctcctacctccctgggtttggtgggatttgtttcccatattggcaaacagtgagtccagtgctcagaagatgtcagaatcaaggtagatgttgagattctacctcttgtttagatgaatgatgataaactcaatttttagaatgaacagaatgattgacaagaaacggggaggagagagctccaggagcctcctggcccctaagcaaacaccttcagcttttctcttcactgcaggagacatcacagttactgtgctcttggacccaggcaccatctctgtggattggttagatggaaatcttggagccaatgattgtgtactgtatacagctaaattggaggcttctcaagggcagaaaccatatctttttctttttctttttctttttttttttttttttttttttgagacagagtctcactttggcacccaggctggagtgctgtgacacaatcttggctcactgcaacctctgcttcctgagttcaagcgattctcatgcctcagcctcccaagtagctgggactacaggcccatgccaccactcccagctaatttttgtatttttagtagagacggggtttcaccatgttggccaggctggtctcgaactcctggactcaagtgatccacccgcctcgcatcccaaagtgctgggattacaggagtgagccattgtgcccagcccagaaaccatatctttctttttttctttttttttttttttttgagacggagtcttgctctgtcaccaggctgtcatgcagtggcgcgatctcagctcactgcaacctccgactccctggttcaaatgattctcctgcctcagcttcccgagtagctgggattacaggcacgcgctaccacgcccagttaatttttgtatttttagtaaagacagggtttcaccatgttggccaggctggtcttgatctcctgacctcaagtgaactgcccgcctgggcctcccaaagtgctgggattacaggtgtgagccacctcgcccagcccagaaaccatatcttatactgtcctgttcttccccacgctaccccaaaacagatttgtttgttttttgaagtagctactaaggggttagatatcagatcttctcctagctgcttaggcccatggtgaactccaactcctcctgtgaacttctataccatatatacagacagtgggtactgtctgcttgctgtagctgtgtaataagcagcaggtcccttaaatggagaattctgccccttaggaacagtgtcatcagaggagctaacagccctagccctaagtcactagcagtcatgaccctcaacatgtcagaaagcagagatctaaccagacacctccataatcatgtacgcgttttaaagatgaagtttatgctgcattccataaaatggaaacaaacttcatatcatatgtattgactacacagcgggcaacaaagtgcacatgaaaagtataacttggccaggctcggtggctcatgcctgtaatcccagcactttgcaaggcagaggtgggcagatcacttgagctcaggagttcgagaccaacctgggcaatatggcaaaaaccctttctctacacacacatacacacacacacacacacacacacacacacacacacacacaaatacaaatattagctggtcatggtggtgcgcatctgtagtttcagctacttgggaggctgaggtgggaggatggcttgatcctgggaggtggaggctgcagtgagccaagattgcaccactgcactccagcctgggtgagagagcaagaccgtgtctgaaaaaaaaaaagaaaactataacccaattacatctaaagtttgaccactataaaacttgggtatgatccctaattaatattaggtaagcatccttaagtgttattctttggtcatctgcttggtagtgtatacattttatctttacttagtatttatagcagctctgctgtatgggtataattatccttacaggtatgaagacagatgttcggagaggctaagaaacttggggaaaatctcacagccaataaggtcagagcctgcattctaacagagctgtcagaccacaaagcttcttgcttgttggccagctgctccctctcccatgtgcagggacagttggttttgtagctttattaactgtccttatcagctgccttgcctttgccttgtctgcagtgtctgctgcctccccaacaagactgacagctacttgagactaagagccgttcccccgtatctaatctgtttggcacacagaggggagctgggtatgttctgttgggttgaacatcactgaattaaacaaggctctgacccagggacctgtaaaggggacagtccccagcaaggcaggcttgctggagagagtagttttgccacttctccccaccctttccttccagaaatccggtttggcaaacgctactgagtttcctgttgaattgaagtaacctcccagagcaacctctgagcagatccacagggctcctcccatgccttatccactctgttttcaacaaatccctcgaatactaagggattggaattcctttcccagctactcaggcccactgtgaactccagctcctcctctgagctctgtagcatgtggtgccaactgtttgctatagccatgggtcaagcagagcccgtctccttctcccagtaatgtattcaatgtcaaagcagaaaagtttggaagattaactagtactatctaaatgtgcagatgaaggccaggtacagtggatctcacttgaggtcaggagttcgagaccagcctggccaacatggcgaaaccttatctctactaaaaatacaaaaattagctgggcatggtggtgggcgcctataatcccagttactcgggaggctgaggcaagaaaatcccttgaacccaggggatggaggtttcagtaagctgagatcacatcacttcaccctagcctgggcaaaaggtgaaactctatctcaaaaaaaaaaaaaaaaaaagaaagtaaatgtgcagatgagaaaaccaggacccagggagggaagtggctggtatcaaatggggataaagcaaggcacctctctccctctctgtgggatatttattcatctgagtccctcaagccctgcctgagaccctacatccaacagttcttggtgaaaacagctctcttggtttccatctgtagcccttcattccatgagacttgaatccagttaaggggctggtgcctgggcatagacaccagttaccctgaccccccatccctgggcttagcccctaggctcctaggcagagctgtcacctcagcatgtcagctcatgtatctagaaggcttcacacttccaagagctctgcacccagtttacttgaacccacacacctctaacaggtacagtctctattttctggatgaggagcctgagcctcaagacaggttaactggcttgttcacagtcactcagctagtacgtgagactggaacctgggctggggctcactccacagccccccatgtgactctaccttaccctggcataggtgtaacccagagatgcctcagttactgggttgctcaggaattagggtgtcctgggaaagagttttcttctgagactctgggcccaagcagggcttcttcaagcctcagtgacgagatatgacacacatgacctctggcctcctctccaccagccagcctgctccacacgagccaggctgacccccgtgcaggttccctacctgctggcgcctgaccccacacacactgggcatttttctgcctcctcaccgcttccaacatcccaacttgtctttttaaacttagttcaacaccctctcttccaacactgctcctcccaggccctcccaccctcgtccccctaacagctgggttcaagctttccaacagctctgtgcccccacaggctctccgtctgcatgcaccgcttagtgctactcaagagcaggcatgggcaagttcaacaccacaccccactggctcataggaggccctcgggaggtgttagtggagttaatgaggctcaacttttggcttcaaagatctttcttgatggccaggggcaactattctacctcagtcaatgcttatgcaccaagatacagtatgagacatccctagacagaatcctctgcccccaaatatctcttccctttgagtctgaaagctttagagcttcctactcaagtgcagacaagggtagccggtagacatgagaaaagatgcctggtatttttttttctttttttttagagacagggtctcactctgtcacccacactaaagtgtagtggtgtgatcatagctcactgcagcctcgtcttcctgggctcaagcgatcttcccctgccttagccttcccagtacctgggactacaggagcatgccaccacatccagctaattttttccttttttgtaaagatgggggtctcactgtgttgcccaggttggtcttgaactcctgggctcaagcaatcctcccacctaggcttcttttttttgagacagagactcactctgtcgcccaggctggagtgcagtggcacaatctcggctcactgcaagctccacctcccaggttccagcgatagtcctgcctcagcctcctgagtagctgggattacaagcgcgcgccaccacgcccagctgccgcctaggcttcttaaagtgctaggattacagacgtgagctaccacgcctgtcctcggtatttctaagaatggaaggaacacaaatccaaacaacaggtggcatttttgacctatcagatgggtaaaaatccagttttttaaaggtatagttttagaggcataatgaagcagtctcagactctgtgggttaaaaactaggacagtttttggggacaattttacagtaactataaaaaatatgaaacacttctagccattttcctacaagaatatccacaccactgcacaaacttggattacgagcatgtttgtcatagaataaattgtaatcatggaaaaaagtgaacagaacttagatgtcaattaatagaggtcgattatattcatcatggaacggtcatacaacagatgcctctctggccacttaaaaagataaggtagatattcatggagtggtgtggaaagatgcccaggatctgttatgtgagaaaagcaagttgaaaaagaacatgtgtaatagtatcccttctgggtaaaaagaaagaagtatgtgtgtctatatgtctgtgtctgcgataggtgggtgtctagcccaagcattagtctcccagcttcagggtcacctttctacagtacatttggggacagaaggaatgtggtgactactgagttatgtactcgccagcttgttccccctgcaccctctcagtcacttccagaccagtcttcatccctgaacgccctggtgcaggggttgttgaggaaagagcattggggtattctgggccccctatacatcactccctcccccaattccccccctcccaccatctcacaggactgtatgggagtcttggactttactagagggttggagccaccaaaggggatgacaatggggatgggaaaatatttcaaactctccccaaattataaagtttttcgcaagtgggcttttgaaatggatttactgaaactgagaatggtgcacccaagggtgaccccaaacccttgacagaacttgcctttcttaccttgaaacctcccagtcaacagccacaggagctggctctgtggggggaacacacatgagggaaatgcttattcttatagtatgaggaggaggcaccaagaaggaaaatttgtccaaggaattccctgaggggcaccccagttcctagccttgctcccaggacttctggtctgcctttggctttctttttttcttctttttttttttttttttttttgagatggagtcttgctctgtcacccaggctggagtgcagtgacgtgatctcggctcactgcaagctccgcctcccaggctcacaccattctcctgcctcagcagcccaagtggctgggactacaggtgcctgccactacgcctggctaatttttttgtatttttttagtagagatgggtttctccgtgttagccaggatggtctcgatctcctgacctcgtgatccgcccacctcggcctcccaaagtgctgggattacaggcgtgagccaccgtgcctggccctgcctttggctttcttccttttttttttattttctgagacagagtctcgctctgttgcccaggatagagtgcagtggtacattcatagctcactgcagccttgaactcctgggcttaagggatcctcccacctcagcctcctgaatagttgggactacaggtgcatgccacaacatctggctaattttttcaattttttgtagaggcggagtctcactatgttacccagtctggtcttgagctcctgggctcacgtgatcctcctgccttggcttcccaaaatgctaggattgcaggcatgagccacctcacctggacttgactttctttaacatgctttctgcatttattcatagcctttggaattataatcaattgactagtattacatattgatataatgtattacattgttcctttaatgttgatcacttacactgcttctacattttccatataaatgatgttgcagtgaacatcttcatgcatggagattttttgcttatattgtattttaagagtgaagttactgggtcaaagagtataatataaacgtctttatggctcctactaaagattgccaaattgcttccaaaagagttactctgatttataatactaccaacatccattcaatctataacttctagtattaccttgccaacactggctctttttatttttttttggttggctattttagcagattataaatggtatctcaaagctgtttttcctgtttttctccttactagcaagggtggagttcagattttcgaaaagatatttttttcgtgtttttttttttttttttttagacagagtcttgctgtgttgcccaggcaggagtgcagtggatctcagcacactgtaacctccgcgcctggcctcaagcgatcctcccatctcagcctcccgagtagctgggactataagcgtgcgccactacacccggctaatttttgtttctttggtagagacacggtctcgctgtgttgctcatgctgaaagattctttttctttttttgtttttttaaagtgtcctaaattatagtcacatgtgctctttccaaccagttagactgtaatgaataatattaatgataataataacaattataattccttaggcctttagagcactttgcagtttataaactgttataccattgtgtcttttcattctaccagtaggtgaaacagggcagggatgttccccccacctaccacctaccttattgattaaatagttgaagctatgcagaggaggtttgctttgagtgacagaagcccaccagggctgatgtaaataattaagggggtgattccaagactgcagagaaacagctcagtctctccctgtctggggccacgtggtctcctctctgcttctctctgcatgtcccatcctcctctctgcagatcatctttttctgcttctttatcagtatccacaagactgaaaatagcagctctatccaggctctgcccatcctttcagctcaggccccaacatctgatcagtctctgccttcaagtccaccatctctaaggagagacctggggcccctcagcctcccagatgcagttccccctgcccaggggtccatcctgggtgggggacacagtgggggataaggccctgcagtccaaacagccaaagtggggctgagcagagtagcaggaaggcagagtctcctagaaggatgtggcatgtgaagcaaggataggctttttaacacaacatttgctaaaaggggctcatgcatgttcttcttatccgggctaggccacagcagtagcaacatgccagtaataacagttcttaggtctgcagagacttcccagagaaaacctcccacaggcagagagatggtctccttcctctccagccacaccctgagacctcccagcaggcctcagtcgagctttgcccatcgcctcaagccaggaggtggctcatcaggcagatctcagaaagcctggtgtccgaggaaaggggcacctctcatcaagggacttcttggccgtgtccacccagcctggaccctcatctccctctgcaggtgcggatctgggagatccccgagggcgggctgaagcggaacatgacggaggcgctcctggagctgcacgggcacagccggcgtgtggggctggtcgagtggcaccccaccaccaacaacatcctgttcagcgctggctacgactacaaggtatgcagtgggcaggcagctgggtggagagggattggggaagagaaaggggccttttgggtacccgtaggaagcactgttgcttcctaagcaaccaatatggcctcatctgttcatttgcttattcattcattcattcattcgctacacgcaactgagcaactcctgtgcaccctgtcattcctggggtccacagaggccggaggcatcttttctgccttctctggtggttgattggaggagaatgccccttccatgcccacaccctttgcctggccacttcttaaccaagaggtggcaaaaggggtaaccaaagctgctggagggcaaaaagtggagcctcagccccgagccccaggcacatcctcaaaaaaaggtgggctgaccacatgggacctgacaaggaacatgtatccttcttgctcttccataaactgagcccaggctggtgctgggatctgaccaaggatattgatggatttgtgtgccagggatgtatcagcctttccatatagaactcaatgaccccctcctgcaccccagcacaccccaggccctgcatggggcgcttctcccagggcagtcaagtgtgcactggggacaaacaccccaggaccctagcagccactgaccctgcctcccatgcatcttccctcgcaggtcctcatctggaacctggatgtgggtgagccggtgaagatgattgactgccacacggatgtgatcctctgcatgtccttcaacacggacggcagcctgctcaccaccacgtgcaaggacaagaagctgcgtgtgattgagccccgctctggccgtgttctgcaggtggaaccctacattttttgagattgaaggggaaggtattgagggctggggctcagctttcagcaggcctggaagaaaaaggctgtgccagcccccttctccagtgcatctcactgcacctctgttgaacaacctttctctctcctgggcccttctcagctcataggaaccctgccttgttctgggtggggagggacctcataccctttcctgtccccactgcaccccctacctccagacaggattcttctggcttgctctgggggctgaactggtgacacccttcagtgcatacatccccaggtgttacccaggtccaccacaggcacaggaggaggagacactggactcactgcccagccacttgataggatgagcctgagggaaatggctagggtgccaaggctgatggtgaacttagctccacttttggtctttgaatctcctgggtcttgggtttgaggaaggggttaagtgccatttggaagtaagaaattaccattttttgagcacctgctgtgtgctggtcatggggagagatggaatggaaaatatggatgatatctgaggtttgccttctacacaagaagggattaatgcttgatctgggtgtgtttaccttggaatagtccaatattacaagaccagaaagttttctagtactataggttgagcatcccaaatccaaaaatccaaaatccaaaagactccaaatccaaaactttttgagcactgacataacacccaaaggaaatgctcattggaacatttcagattttggatttggggatgtgggaagctcaactagtaggtataatgtgaatattctgacatcggaaacaatccaaaatctgaaacacttctgggcccaagcacttcagataagggctactcaacctgtaccactacaaataagaataatgagagttgcttagcatgattagtgttaactgacatctgctaagagctcactgtgtggcctgcactgtgcccggggctctgcacatcatctcatttaatcctcaggacaaccctctcagctgggtgctgttactcctctcatgtgatacgtgagaacacttaaccttagcgaagttgggagacttgaatctcacagttccaggaggagctaggattcaaacccagagcccatgccaagcagaaagaatgtttatgaacagagaacccccacctccaattcccaaatggggccatgagcccagggaaggtgaaggtcttctcttgggctacacttttttggtggagctagaactagagttcagagtgtatgacgccagcctgaatatgtgcactgccccattggcctcttttctgacttgctgccaacttacctgatgccgaggactgttgtgtgttaggaggaaatcaagtgtcacgagccagtgggcaggaaaggaggcccaagacagctcagttaaggaggcactccctgatgaggcaagctgtgaagcagtgatgggcatgagtctcttgtcctcctgagcctcagtttcctcaccctcaaaatggggataatgatttcttccgatagatattgttatggggatgaaaagcaatgcccctggtgagagctcctgaagtggtgtagcccccaactggacttggtggacgttggctcccctctcgctccctgttccccacattctctgggaaatggcagagaaggcatctgtggagccattgctgcacagtgcttagaacagtgtcctatggctgctgtaacaaatgcccacaaactaggtggctgaaaacaacagaaatgtattctctcaccattccagaggccagatgtcccacatcaaggtgtcagcaggactgtactccctacagatgctctaggagaaaacccattccttgcctcttctgggggttgccggctcccgtggctggtggccacatcactccagtctctgcctccagggtcacacaccttctcccctgtgtgtctctgtaatcttacctctctcccacaaggacactcatgatggcatccaggatccacctggataatccagggtaatctcatctccaaatccttagcttaaccacatctgcaaggacccttttccaaataaggaaataattgcaggggccagggctgaggacatgggtgtatcttttcgggaccaccattcatgccactgcagaacccacatgttggggaccctggctcaccacctccctctgttcctactaggaggccaactgcaaaaaccacagagtgaaccgggtggtgttcctggggaacatgaagcggctcctcacgacaggggtctccaggtggaacacaagacagattgccctctgggaccaggtcagccacggggaggcctgctgggtttgggctaaaggaagcatcgttgcctcggaggtcacttcctcagaaagtcaggagcctgggcccgcacaccagcttctcatagcattcccagtggagaaatcagacagagacccccagaggccgagcttgggtacagaggcttcaaggaacaatgtcggccacacctgcaagatgttcaccctctttttccagagtgggggctgagctccagagagattgagagacttacctggggacacatagcaagtagcaggtttggggacaatgagaacaagtcccttgcctcctgtttgtaagaccctttccactgcccctggctgcttttcgtgacaagaaagtcagtcttgccaccacccataggacgggctttttaacatctaggggaggtcttaacataaagtagttgccatcctaagaggccttcctgggatttggggaggggtatgccatcctgcctgcagagaggctgagaccagctcttctccctcaggaggacctctccatgcccctgatcgaagaggaaattgatgggctctctggcctcctgttccccttctatgatgctgacacccacatgctctacctggctggaaaggtagtaggaggtgggggagggcccggggcagcctgtgggagagccctaccctcaatgcacccctgcacctgccccaccccctggagagtagccagcctaaccttccaagttcctgggcctcacctttcccatccacacctgccctcaagtctgacacccattcttactcaagtgtctgctaccaagaattccttcaaaggtgagctggagcgggcttttacattggaataaagatcagagcctgcagtgtagtcagtgatgaatgatggaatttgagatacccgccaggagatccttggtgaatacagccttgtttgtcagaaaggctgtctacacacacacactcacatcagcccatccacctccacctctccacccgcagtgagtcccctgtggtgcacccactaggagcctagaagccaggtttccttggtttttttaactgcccatgaggcacaggggagagctgtcttcagctggctcctgggaccaggccctgctctgccctccctacctgccaccttcctcaactccatctctcctgaccccagggtgatggaaacatccggtactacgagatcagcactgagaagccctacctgagttacctcatggagttccgctccccagccccgcagaaaggcctaggtaaggggccccgaggctgccacagctggtgtgctcatggcacgggaggacatctggcccatgggtcaccccctcccttaagtggaaaatcagactcagaaggccatagcacatgggcaagttggaacagaacctgcaagagctggccctgctgcagctgtcactgcccactggaccggcgctgtcaccccactgtgctcacatccaccatcagcggcagcttgccagcatgtgctctgcgtctgcactcctgatcgcagatggggagcctgaagcccacagtggctatgatgatggtgggaagtggtcccgtaactagaggtcagagtggggtctaggcacaagtcccttcctgagcctctaggaagccgtgactcccagatcccagcagcagctctgtctgcctgatagggcaggaagaagttccaggtgttcccgtgactgcagccccaagctccctaggctctcaggcagaaacccagagagggctctgggattgacagggtgtagtgagtgagaccccacattctcccaccactaaaagtcttacaaccaattttccttcctttcaactaacctggtaatgcatatgattcagcaattctatatttcgggtccaaatcacccaatgaaacacctattttcagggacctcccgttcccacctctgcgggtgatcctctttggagcttgagtctagcttgctttccctgtgggtctggtattatggacagggcctgagggccagcttcaggaacatcggggctgaaagggcctgagagcccactccagtgaccaacagcaaaatggaaaccaaaagatgtccgaagtcctaatcaccattccatcaactttactcttccccaactctgtcatccccacctccttcactgtcactcctgcatcaaatagtataaaaatcagcctggactttggagtcagacctgggtttacattctggctcagctgtgcacttaatccctctaagtctcagtttcctcatctgtaaaatgtggataatcaaaccttccttgaatggctaatgtaaggcttagagaccatatgtgcaaggcacctggcagagcacttgactcctcctgctccttcacatagttgttcaacaaacagttattgacctccagctgtgtaccagaccctgcgcgaagtccagtggcaaataaaacagaacatggccttactctcatggagatcacattccactgagcaggagacaggcaataaacaaataagaaaaatattggatgggaatgagttctaggcagagagtcaaatggtgtgctagaacagaaagtgactgggggctacttcaccccggtggtcagggaaggcctctctgtgatgatgatattttaagttgagctctgaaagatgggaaggagaaagagcagtcccagcagggggaatggttagtgcaaagcctctgtggccagaatgagcctggcatgttctaggagcagaagggaggtcagtgtggctgagcgtggtgtagactctgtgatgtagcaggagatggggggaggatgttaggagaccatcggagaggggggcaggggctaaattcatgggatgcattagcctgggaaaggagtttgcatttgataaggaaatcattatggggagggttctttttcttgagtgggacatgagacaacatgatgggatccgaaatgttagttaagattgctctggcagccaggtgtggtggctcaagcctgtaatcctagcagtttgggaggccgaggcaggtggatcacctgaggtcaggagttcgagaccagtctggccaatatggtgaaaccctgtctctaaaccctgtcaccaaaaatacaaaaagtacctgggtgtggtgatacacccctgtaatcccagctacttgggaggctaaggcaggagaatcgcttgaacccgggaggcagaggttgcggtgagctaagatcacaccactgcactccaacctgggcaacagagccagactctgtcaaaaaaaaaaaaaaagatttctctggcttcagtagagagaatggatttgggaggggcaggagaaagacagggaaaccagttaggaagaagttgcagacttttaggcaagagagaataataggtggggagaaggaagacggggagaacagggtgaatccagatgtttagaaagtaatgtcagcaggacttgctaaggtatcggatatggaggggtggagaggaaagaagcaggaaggactcagaatgactcacttcatcctcatcctcatcctcctcacctgtgaccactattgagcatttgctgtgatgtaggcacttcttgtagactcagaaaagttaagcaactcacctgaggcaggtcttatctgctaagtagcagaagaactcagaccgaatctgctggctcttaatcccatttgggaaaccatttcaccccttacctccagctcctagaattcctttatgtggaagagcaggcttccagcccagaggaggagaggcagagccttaactcatattcacaatacagggaaagaaatgaatgtggtctgtgctcgtcacggtgccaggcagttaatgagtatcttggaacatattctgctgatcacctcaggtagggccattgttgtcctcctcgaaccagccaaggaactggaagctcagagagttgtgacttgccaaaggactcctagatggaaagggggcagagtgaggactcaaaccccgttggtccacccctagatagagctgtgctcctagcaccaccacactgcccctcatccccatgatagacgttcagcagaggcagctgttagggacatgtggtaagtgaacccacacaggaaacatgtgcacacattgttggttctaggagacatagaacagaacagcaatcttaggctgcgtccagacctctagggtgtatggggaatggcctctccctcctttctctctcaggactggagacacaggaggattagggatgactgttcatttcagagggtaatgggctctgtggccctgcccctgctgtgctctgtgaccttgggtaaccccttgccctctgaccctctctggaccctcatctagaaaaggagtgggctagattcaaatgtttctgcagtttcttccaattctaaagggtccaattctaaagcacgcactgtggtgaggcaggtctggcccaaggagcttgagaagtgaccacccagagacagagactgattgaaggcgccccggtctaccccctgccctctgcatgggccgttgcctccaaacctaagtacattcctcagcctttcccctggcccagaacatcatggggtgatgtcactgagacgcagtttctgggaccccatggagccacatgtgtgcctgttacaggggtcatgcccaagcacgggctggatgtgtcagcctgcgaggtgttccgcttctacaagctggtgactctcaagggcctgatcgagcccatctccatgatcgtgccccggagggtaagtggggctgggctgggctccaggaggggggcctgcatcgcctcttagcctgctcaccactgaccatgaccctggagaaacccaggtgagagatgtgctgtggactggggtcttcaaacctaatttggggtgaggggcattctcagatggggacagttgggtttgctcatgagtgcagtcaggtagttccaggagggagacacagtgcaaaggcatagaggcaggagagcaggtagcgtgattggagatcagtaagaagagtctgactgaagagtaggggctttcccagcagccccccatgtgtcctctcttctgctcctcccactgtagtcagattcctaccaggaagacatttacccaatgacaccaggcacggagccagcactgaccccggatgaatggctgggaggcatcaaccgaggtaccacagcggggggctccacagagcacaggcggctgcagcctttgccttcagcgcagctcaccccagttctccttgtctgtccccctgtttgaacttccctcccacccagcctgctggaccatcacctgacagtccatgggatcgtcagtgagagcgtttcccttgccttctttagatcccgtgctgatgtctttgaaagaaggctataagaagtcctcaaaaatggtatttaaggctcccatcaaagaaaagaagagtgttgtggtcaacggaatagatttattagaaaatgtcccacccaggacagagaatgaggtaaggaatgtaagttattacctccacaggccctggaagagcaagacctttacatttcaattatgggcttcaggcctttaagccagttccattctgagacatttttctttctgtgacaaatgccataagtagcctgatattggcttctgatgcttctgaccccaataaatagaagctgggatgtctggagatatcggttccccacaccacccccacgcctcaaattcactaacccacagttatgcatctcctcgtgaactcatttcagaacgttgctgtcatttggagttccaggagttataaattcctgactaacaggggcaagcccggcctcgtgtatcacagccctgcctccctcgctggcgttgcagcagtgctggagtctgacacttccagtctttgtggaagagactgggtgtttatgaaggtgctctctgtaccacttggaatgggagcaagctcttttggggcagctcggctgggccttgtccatgtcccccagcggtatttcgttccagcccacacccccattccctgatgccaacatggtttagctcagctgggattcacaggatgcctactgtgtgccagacataaggcctgatacaactgaaacggagatggctgcatgaccccacctgcatttgaatcctggctctgccatttcctggctgtgactgagcaagtctactgacctttataagtccatttccttgtggtaaaatagggatatggaaagctgtgagcattaaagagataattcataagtgtctagcactcttcctggctcatattaagtgctcagagaaaaaggtcacctgtattagctatctactgctgtgtaacaaattaccctagaacttaatggcctaaacccacaaatgcttattagctcacagtttctttgcatgcccgtggctgaaggtctctcatgagggtacagttacactgtccactggggctggaatcacatctgaaggctcaacttccaagttcactcatgtggttgctgctaggactcatgtcctcaggggctattggagtgagggcctcagtttctccttgggctgttggccagagcttccctcaggtccctgccacgtggactcctccataaggcagctcacaacagggtatgtgagcagaagagcaagagagggcacccaagatggaagctacagtctttctgtcacctaatcttggaaatggtatcccaccacttctgccctattctgttcatttgaagcaagctattagggccatcccatgcttgaggagaggggataaaatgggagccatcttaaactagacagtctataccaccaacttatgctatcactattttttgttttgagacagagtctcactctgttgcccagcctggagctcagtggcacaatctcagctcactgcaacctatgcaggttcaagcgattgtcctgccctagcctcccaagtagctgggattacaggtgtgcaccaccacacccagctaatttttgtatttttggtagagacagggtttcaccatgtttgccaggctggtcttgaactcctgaccttaggtgatccacctgcctcggcctcccaaagtgctgggattacagatgtgagccaccacacctggcccactaatcactattattaataaaaataagacccttcttgacctctgggacctcacagtcttaagggggagattggcaggtaacttgataattgccataaaatatgcttgtatgccattgtagagggatattcagggctagatgaaatgatgtgataaatgggatttgctttaaaataacccctgaggaaagtggtgcagtgtaggtgggtggcagtagaggcgaagtaagaatggtcatacgggctgggcgccgtagctcatgcctgtaatcccagcacgttgagaggccaaggcgggtggatcacctgaggtcaggagtttgagaccagcctggtcaacatggtgaaaccctgtctctactaaaaatacaaaaattagccaggcgtggtggtgcgcgcctgtaatcccagctgctcaagtggctgaggcaggagaatcacttgaacccaggaggcagagactaaagctgagtgatgggtacttgggggttcatggtgctatactttctattaatatagatatataacatttttcatttaaaaaatttttaagtgttttcttgtatttatttatttatttatgttttagagacagagtcctgccctgtctcccagactgcagtgctgtggcacgatcatagctcactataacctcaatctccgaggctcaagcaataatcccaccttagacttctgagtggctggaactagcggcgtgtaccaccatacccaactaatttgtttttaaacatttttgtagagacagggtcttactatattgcacaggctggtcttaaactcctgggctcaaacagtcctcccactttcgcctcccaatgtgctgggattacagtcatgagacactgcgcccagctattttcttgtttttaaaagaactctactctttgaagatagagacacaggggtcattgtgatagcccaggagggcaataacaagggcctgagctcagttctggcactgggtctggagaaggcagggttgaatagtagttaaatcaagcaatatttcgctgtagacttgcctatggaatcagaattgagaacctggaggaaaagcttaaagggtctcagagcagacaaaacagatgccacaatctacaccaaagttgtgcatcttcctcgctgggaagaagctttctcaaagcctgctgactctgcctttatccacagttttaatcatcatagcagttcggaagcagccagttagaaagtggggctgtcaaaggtggacgcgttgatctaagtgtgaggaaacaactgacagcttgatgcgagggaaaagtcctacgattgtacaactcaggaactttactaaaaatcgctgaattgtaagcttaaaatgagtgacttttatggtgtgtgaattacacctcactaaagcggtttttttgacaaaagtggaccaaaaaacaatgcaaagaaattttgagaacttggaagacgcaagagtgtgtagagtcatttagtgcaaaggcaaatagcacgtcatccctctcaacagatgtaactgggactggtggtttgttagttaacaaaaaatatttttttaagttatatttttttaagttagttaaaggaggcaatcatggctgggcacggtggctcacgcctataatcccagcactttgggaggctgaggcgggaggattgcctgaggttaagagttcaagaccagcctgaccaacatggtgaaaccctgtctctactaaaaatacaaaattagccaggtgtggtggcgcacgcctgtaatcccagctactcgggaggctgaggcaggagaatcacttgaacccaggaggcagaggttgcagtgagcggatattgcaccattgcactccagcctgggcaacaagagtgaaactccgtctcaaaaaaacaaaaacaaaaggagagaatcataaaaatgatacatacattcttttttttttttttttttttttttagacagagtcttgctctgtcacccaggctggggtacaatggcacaatcttgactcactgcaacctccacctcccgggttcaagcaattctcctgccttagcctcccaagtagctgggactacaggtacccaccaccatgcctggttaatttttgcatttttagtagagacagggtttcaccatgttggccaggctggtcttgaactcctgacctcaggtgatccacctgcctcagcctcccaaagtgttgggcttacaggtgtgagccacggcgcccagccaatagatacatttggtttctttgttgttgttgttttgttttgttttgttttgagatggagtctcactttgtctcccaggctggagtgcagtggcatgatctcggctcactgcaacctccacctcccgggttcaagcaattctttgcttcagcctcccgagtagctgggattacaggcacctgccaccacacctggctaatttttatatttttagtagagatggggtttcaccatcttggccagactgatcttgaactcctgacctcgtgatccacccaccttggcctcctaaagtactggattacaggcgtgagccaccgtgcccggccgataccttctttaaaccatttatttttgttttaaacataaaacatgcgaggtgcagtggcacccctctagtcccagctactcaggaggctcaggtgggaagatcgcttgagcccaggagtttgagtccagcctgggcaacatggcaagactctatccctaaaaaataaaagtaggccggggtggtggctcacacctgcaatcccagcaccttgggaggctgagggtggatcacttgaggccaggagttcaagaccagcctggccaacatggtgaaaccccgtctctactaaaaatacaaaaattagctgggcgtgatggcacacacctgtaatcccagctactccagaggctgaagcagaagaataccttgaacccgggaagcggaggttgcagtgagccaagatcgcgccactgcactccagtctgggtgacagagcaagactctgtctcaaaaacaaacaaataaataaataataaaaataaaacatatacattcatttagcatattttgatgcaggaccaggaccttttcttcaaggaggccctccctggttggaatctgccatgtctttcacacaaatcacaccttaactcccatttccagtttccatttcttttaggtagaaaaataatttaaagttcatctgaaagcaaagtcctagtttttacaatgttttctctcatctttttttgagacattgaggtataatttgcctatggtaaaattcatcctctgtagtgtgtcggtttaagagttttgacaaacacacacagtcatgcagccaccatcagccaagatatagaatattctccagtcttttagggctagatcttccacacccaattcggccacagtttttttagcatcacctttatcaagattttctaaagcatttaattaagtttttatagaaacaacaactctctttttgtgctcatttcatcaatttatattatatttcattaaattatgcaattacaataacaaatgtaattcacaccagaaagtttgagaccaaacacaattgactgtgggtaacattcaactcaggtgtgcaggagcctcaaggagcctgctgccttccagggctcggcgttttgtggacatctgtcaatatgctttacaggagaaatggaggcgggttaagctagagagttattggggtgaagatctgccaggatagctgtacatgaatccctgaccagtgcaaactttggtattcttgtcatagttcctcatcagtagggaaaaagctagattccattctgtatcctgagcctccttaagaagagaaggatacaaagcattttagaaagttctaaattatcaacacaagccgggcatggtagcttacacctgtaatcccagcactttgggaggctgaggtgggtggatctcttgaggtcaggagttcgagaccagcctggccaacatggtgaaacccagtctctactaaaaatacaaaaattatccaggcatggtggcacatgcctgtaatcccagctactcgggaggctgaggcaggagaattgtttgaacccaggagacagaggttgcagtgagccgaaatcatgccaccgcactacagcctgggcgacaaagcgagactttgtctcaaaaataaataaatacataaattagcaataataatgtaataatatatgtaatacatgtaataatacatctattatgtattattatacatctattattatgtattattatagatgtaataatacatctattaatacaatggtaaagaaaagcattaagttaggacccaaaaagggacaagcttgggatatttggaaaactggactgtttggtcactcctttttcagtgatcctgaatcaattaatgacgcaggttttgtttcctacctcacaagggaaagtaagagccatggactgagctagagatgggagaggtgcaataaatgcacctggggagaataaatgtatcaagcagtgggaggcctgggggaatgtgagggcacgggcggcaggcagctggagactcacctgggaaatccttgtctcacctgctctctcctgggccctccttggccccctctcttcctccaccccagctccttcgaatgttcttccggcagcaggatgagattcgacggttgaaagaggagctggcccagaaggacatccgcattcggcagctccagctggaactgaaaaacttgcgcaacagccccaagaactgttagctccccagctgggctgttttctaagccgatctctccgtcgtttctactcatcccttaacttctcccttaccagtgaccccagagacagagccaggacaggagtgggggccagcctgaggacccccgcctaccacctcgagaactggaagccaacctctaacctcctgacctcatgctaataaaagtccccagcttctggagaccccctgccggcagcccctttccctgccaccccaggagccaggcttcccctcagctgggtgaagactacagactccctggggttggcaggggctccatctcagtggaccaggaagcaagaggggaagcgggatcccagctagacttagaacttggacttttcccctgtgaagggggctgccaggacatctcagcactcccgcctggagctctcagcatcactgaaggtaccacagtgtaagtgctggactgcaggctgcagtgatccctctttcgtcccaccccctcttccctcagcagccccggaagcctgcctcacccgacgaggacagcgagcggcccggctcctttctgtctcttcccttcccaccctcttgtcttcagggaattcagaggattgctctccaaggccataatgaccccttgccttccccatgattctctacaaagctcttgcacacccttttcccattcaatttgtgagccaggcagggtagggattagtgtccccctttgacaaatgacagaactgagggttgcaatggggaaatgacttataaagtcacccagcaggtcaacaatgggcccacgaccaagaccctgggtgttcagaccccaaggccagggcctttcccgctgcatcaagatgccaatccctttgtgggcttcaccagtgcccaagtctctatggagaatgagaactggaagccactgctaccgtctacccagcaccagtagtgccgatgtgccacactgcccagttgaggcccctcacgctctgtgcccctagatccttcaggtccccaccctcagctgtcaccaccaccctccccaggggactccatctgagatgaggcctcgtcctcctggaagctgaggctgagaagggtggagcttggccctggggaaggcagaccagggtctgatggcttctagggatgctctgcgtgtgtctcagcaccgctatctcagccactttcagccttatgcacgtagaatgaccacagccactcgcatccgtatagcactttaaagtttctgcagtcctttgacacataggatctcatcgagcctcacgtctactcccttctgcagatgaggaaaccgagagaagtggcccaaggtcacgcaactctgagatgccacatttcatttgatcttgtacacattttcttttattccttcttttttcctcctttcatttcccactacgcacaaagagtttataaacactgttctcagaagagtcacagtttggggtgagatctggaaatcaagaaatgggtgtccactcttttctttcattagctaggatctactagatgcattatactccatacctgcttttcccatggccgccctacggaaaatcccatccacagaggccagggctacccaagcccctccaggtgagctgggcctttcctttatgaacctccatcctcccagccagctacagtagggcctcctcaccccgtaccccacagctagacagtgtcagcactcatctcctcctcccacatttctggagcttttttttttccttccccattgacctttgtggtcttctgtgattatttatgctgcctcccaaggatagaattgaaataaaatgttttcaacttatcaaacctgggcatagccatctcatttaaccccagtggttcctgttcttggtcaccatggtaccttgatggtcagctccccacccacagctcctttgcctttctggaatgacaacccacgtctgtacctacagatataatttcacaccttcatttatctcagcactattgacatttggggcgaataattctttgctgtgggggctgccctgtacattgtaagatatttagcagtatccctggctccaccaatcagatgccatagcaaccctcatccaattgggacaaccaaaaatgtccccagatattgcccaatgtcccctggggtgtcagaatcacctcccggttaagaaccactgttctaccgctattcaatagatgctgccccgtgttggggtctgggtgagaccaacgctctacattggaacggtgccttgaagtttatcaggcaggattccacacacttgactcatttgatcttcatagcagctctaattggtaggtccgattattcctgttttcaagaaaagcagtcaggcccagagtggtgacatgttcaaggtcactcagccagtgtagtgggggaaatacacagggactgggtcttatgagccagagccagagaaggtctgtgttcccagtccccagccagactcagagctgggcagagtctgttctgggagcgtggccggggcccattctgagaccagggatgctagatatcctcagtctctcagtagtccaaggttgtcttaaataagagttgtcaggctgcaaagtgaacaggcacccggcagtgtgtacaccacaggaaactcagaagagccagaagaaagcagtgtgggccttagaaaaggggtgaggaggaaaggataaagggctgcagaggaacagcgggcaggacaccgggaaggggtggtccaggcctggccctaccctcgactagttgtgcaacattgagtaaggctttttttctccctgggccccattttctccatctataaaatcaggggatgggacaatttctagggtcccttcctggtgtgtcatcctatgtttcgttacactagcagttgagaggatgggacaaatccccaagaccacccattgtctagcacgagtgattaaaaaaagaagaaatttattgggaaaaaggaagcaaagaatgacttcctacaggacttgggtgcagaaaatcacttttgctgagtctcagggaacaggtgaatggataaggttatctgtctcatatgtacttctgtcccacctaatctccaattctgagcccaacggggcggctgtttatcattacttattatggtacactgtctaaggtcgggctcgaacttgctttctgtctccccactagcccattttcccaactgcatttgttgaataactcatcaattccccattggctggctgtgtatccttaatttcttcatatgttatatattccatgactagtctgttacgctggcccctctgcccattacacactgcgaattacactgcctagcccaacacattgctttaattatcataatgatgtaggagagtgccattcatggctctttgaacctgtccccactgccatgctccctaccaggtgtctgctcccttcttttctccaagtaaggataccttaagctaaacttcagacccttctcttctacggagatgtccctaatgcctttaccatcagcaagagtatcctcctgcacgtgcctacaactctttatcctacccctgacacctaatcgaattttcaactcagtttaacacataccaagtagctgcatctatttaggaccaggtgctgggaacca

SEQ ID NO: 2264 - DNA, 1369 bp, Homo sapiens
acgccgcgcccgcgcccccgctccgccgcggagtttctgcatgactgtcacaaagatgtcctggcgtccgcaataccgtagctccaagttccggaatgtctacgggaaggtggccaaccgggagcactgcttcgatgggatccccatcaccaagaatgtgcacgacaaccacttctgtgccgtcaacacccgcttcctggccatcgtcaccgagagcgcagggggcggctccttcctcgtcatccccctggagcagacaggcaggattgaacccaactaccccaaggtctgcggccaccagggcaatgtgctggatatcaaatggaaccccttcatcgacaacatcattgcctcgtgctcggaggacacgtcggtgcggatctgggagatccccgagggcgggctgaagcggaacatgacggaggcgctcctggagctgcacgggcacagccggcgtgtggggctggtcgagtggcaccccaccaccaacaacatcctgttcagcgctggctacgactacaaggtcctcatctggaacctggatgtgggtgagccggtgaagatgattgactgccacacggatgtgatcctctgcatgtccttcaacacggacggcagcctgctcaccaccacgtgcaaggacaagaagctgcgtgtgattgagccccgctctggccgtgttctgcaggaggccaactgcaaaaaccacagagtgaaccgggtggtgttcctggggaacatgaagcggctcctcacgacaggggtctccaggtggaacacaagacagattgccctctgggaccaggaggacctctccatgcccctgatcgaagaggaaattgatgggctctctggcctcctgttccccttctatgatgctgacacccacatgctctacctggctggaaagggtgatggaaacatccggtactacgagatcagcactgagaagccctacctgagttacctcatggagttccgctccccagccccgcagaaaggcctaggggtcatgcccaagcacgggctggatgtgtcagcctgcgaggtgttccgcttctacaagctggtgactctcaagggcctgatcgagcccatctccatgatcgtgccccggagggtaaattcctaccaggaagacatttacccaatgacaccaggcacggagccagcactgaccccggatgaatggctgggaggcatcaaccgagatcccgtgctgatgtctttgaaagaaggctataagaagtcctcaaaaatggtatttaaggctcccatcaaagaaaagaagagtgttgtggtcaacggaatagatttattagaaaatgtcccacccaggacagagaatgaggtaaggaatgtaagttat

SEQ ID NO: 2265 - protein, 443 aa, Homo sapiens [sequence omitted]

SEQ ID NO: 2266 - DNA, 1432 bp, Homo sapiens
acgccgcgcccgcgcccccgctccgccgcggagtttctgcatgactgtcacaaagatgtcctggcgtccgcaataccgtagctccaagttccggaatgtctacgggaaggtggccaaccgggagcactgcttcgatgggatccccatcaccaagaatgtgcacgacaaccacttctgtgccgtcaacacccgcttcctggccatcgtcaccgagagcgcagggggcggctccttcctcgtcatccccctggagcagacaggcaggattgaacccaactaccccaaggtctgcggccaccagggcaatgtgctggatatcaaatggaaccccttcatcgacaacatcattgcctcgtgctcggaggacacgtcggtgcggatctgggagatccccgagggcgggctgaagcggaacatgacggaggcgctcctggagctgcacgggcacagccggcgtgtggggctggtcgagtggcaccccaccaccaacaacatcctgttcagcgctggctacgactacaaggtcctcatctggaacctggatgtgggtgagccggtgaagatgattgactgccacacggatgtgatcctctgcatgtccttcaacacggacggcagcctgctcaccaccacgtgcaaggacaagaagctgcgtgtgattgagccccgctctggccgtgttctgcaggaggccaactgcaaaaaccacagagtgaaccgggtggtgttcctggggaacatgaagcggctcctcacgacaggggtctccaggtggaacacaagacagattgccctctgggaccaggaggacctctccatgcccctgatcgaagaggaaattgatgggctctctggcctcctgttccccttctatgatgctgacacccacatgctctacctggctggaaagggtgatggaaacatccggtactacgagatcagcactgagaagccctacctgagttacctcatggagttccgctccccagccccgcagaaaggcctaggggtcatgcccaagcacgggctggatgtgtcagcctgcgaggtgttccgcttctacaagctggtgactctcaagggcctgatcgagcccatctccatgatcgtgccccggaggtcagattcctaccaggaagacatttacccaatgacaccaggcacggagccagcactgaccccggatgaatggctgggaggcatcaaccgagatcccgtgctgatgtctttgaaagaaggctataagaagtcctcaaaaatggtatttaaggctcccatcaaagaaaagaagagtgttgtggtcaacggaatagatttattagaaaatgtcccacccaggacagagaatgaggtaaggaatgtaagttattacctccacaggccctggaagagcaagacctttacatttcaattatgggcttcaggcctttaa

SEQ ID NO: 2267 - protein, 463 aa, Homo sapiens
MTVTKMSWRPQYRSSKFRNVYGKVANREHCFDGIPITKNVHDNHFCAVNTRFLAIVTESAGGGSFLVIPLEQTGRIEPNYPKVCGHQGNVLDIKWNPFIDNIIASCSEDTSVRIWEIPEGGLKRNMTEALLELHGHSRRVGLVEWHPTTNNILFSAGYDYKVLIWNLDVGEPVKMIDCHTDVILCMSFNTDGSLLTTTCKDKKLRVIEPRSGRVLQEANCKNHRVNRVVFLGNMKRLLTTGVSRWNTRQIALWDQEDLSMPLIEEEIDGLSGLLFPFYDADTHMLYLAGKGDGNIRYYEISTEKPYLSYLMEFRSPAPQKGLGVMPKHGLDVSACEVFRFYKLVTLKGLIEPISMIVPRRSDSYQEDIYPMTPGTEPALTPDEWLGGINRDPVLMSLKEGYKKSSKMVFKAPIKEKKSVVVNGIDLLENVPPRTENEVRNVSYYLHRPWKSKTFTFQLWASGL

SEQ ID NO: 2268 - DNA, 27464 bp, Mus musculus
  misc_feature (1)...(27464): n = A, C, G or T/U
ccccaccccctccctccacttcttggtactttacagtcccacatcacagcatctgtctactgccactagtctcaccttttcctaaatttcatggaatggctcaggattttctgttggttcttttctctttgtgacacttttgagattcacccatgctcttatccgcaccaggggctcagttgctcctgtgagggagttgtctccattactaggatgctccacgacgagtttaatccatgcagctgttcatgctcttagttttagtttagaactattacaataaggttgccaggaacctgtccggcacaagtcttcctgtggacagatgctgaataaacacctagagacaggacggctggatcgtgtgataacacatatttaactttctaagaaaagtttaactgttttccaaaatacctgaaccaactcaagttgtgcaatcttgaaaactgagcagggcaaaggtggtgcannnnnnnnnnnnnnnnnnnnnnnnnnnnnnnnnnnnnnnnnnnnnnnnnnnnnnnnnnnnnnnnnnnnnnnnnnnnnnnnnnnnnnnnnnnnnnnnnnnnnnnnnnnnnnnnnnnnnnnnnnnnnnnnnnnnnnnnnnnnnnnnnnnnnnnnnnnnnnnnnnnnnnnnnnnnnnnnnnnnnnnnnnnnnnnnnnnnnnnnnnnnnnnnnnnnnnnnnnnnnnnnnnnnnnnnnnnnnnnnnnnnnnnnnnnnnnnnnnnnnnnnnnnnnnnnnnnnnnnnnnnnnnnnnnnnnnnnnnnnnnnnnnnnnnnnnnnnnnnnnnnagagagagagagagagagagagagagagagagagagagagagagagaagaaaagcctaactctaactctgcctttagggctcttctacaaattatttgattgctggacactgaaactgaaactctgagaattgaggccatttgctctttccgtgtgcaggaatcatgtccccataaagtcacaagcaaggtcctgaaatgcatgcccctctgtgcccagaaattgacactccgtttaccctccacagcatacttccatgacatttaagagctaaaggagatggcgttcttcaagggagctggcaggatgggaaagagcaggcctgtgactcccattagatttgggcagggctgtgctgctcatccagggaagccccccccccccccagcctggactcctctccccttggcagcagctggtctttcaggcagaaggcagatttgttggtatttaagtaattggaggattaaatgggtcacaggctcccccctcgatatgcccacccaagggttattaacttcatgatcacatctgggtacctcagcccctccctttgcagcccagcagcactgcaaagccacagagaggggaagagattggggtcagagtggggaagccacagcagcaccaatctgcagaccagattcctgggaattaagccgaggacctggtttggatgctgtcactggctgaccttgaacatattacttcagctcaggatgttggtgttgtttgttcccaaatcaggacatcacctgttctggttatgacataggcaagataaaagagataaaagaaaaagagccatggaaggagggctgggctagaggtggctgccttctgagagtcttgaaactgggcaaagttcaatagcacttggggaggagacaaagacatcaaaagtttaaggacggggctggagagatgactcagaggttgagagagagcactgactgctcttccagaggtcccgagttcaattcccatctgtaataaaatctggtgccctcttctggcatgcaggcatatatgcagacagaatactatacataataaataaacacttaaaaagtttaaggtcatccttagctatatagtaagtttgaggctatactggtttacatggatgctatttaaaaaaaaaaaaaggaaggaaataagataaagaaaaatttttaaaaaatgcatggaaacaaatgtagcatttggtagttaccacagcaacaatctagttgtggcctctgggctgaagagaatgattttgaggcagagagccccagcctctcatggtcaagcagtccatgcaggtctgaccaaagtaaggaagaataactttcattaaaaaaaaaaaaaattcagagttcaatgcccctgtaccataaaaggggacctcagaacaggctgatatacataaccagtctgggagttggctgatatagataacaaagctcagttggtagagtggtactgtacaagcatgaagaccccagtttggatccccaggtgtatgcagcacatttgtaatccacagagacaggtggatctctgatgcacactgaccagccagtctagccaaattgataagctccaggcccagtgagatccctgtctccaaagacaagagaaacaaccaagacagacacccagtgaagacctctggcttccacatgcacctgcctgtacatgtgcacaatctccaagatcacacaatcaccacacacgagtgcacacacacaccacaccacgcatacacatgtacaagtgcatgaacgcatacatgctctccaacaaaaccagcccaacagagccagatagtctgcaagaggctcatgcatttctcaaagctatagatgaaatagctcaccctttgttacagatgagtaaactgagtctgggagaggccgagcaatttatctgacctctgtgacactggtccccagacagtgtgccttgcagatacttctcatgtttggcttctgttctcttttctcattgggacattgtctccttgggttctggatgccatctatgttcctgcggctcaatctatctgccaggctcctaccgaccgacatggcgtctgagcttcacacccatgggtccaacagcatcctgacccaaccaaagcttcgtgggtccaaagatgacgtctcatttacctgtgcttgctccacccacttagatgcagcgcctggtcacatctaaactcctctccccttacagccatgcatccgaagaagatagctcccacaccactgggcatgtctcacccccaacccccctttactgatacagtccaggaccctcattagaacttggtacccgacaggctgcacctcctccatctctggttctgcctctgggctgtgcctgaaatgcacacatatgccagtctcttgccagggcccttcctgaggttctcagggattgggggctccaatctaaacccctctctcccccatctcagccagtctctcactcccctgagcagcgtggttctcacacaactttccactcctccataccagctagtctctggacagggtgtgggaggaggaggggtgggtgtgtggggaattctggccgttccctctgcctggagctctttcctgtctccagttcatacttctctgtcagctatccttcctgtgatgcctgtttggccttactgcctctatggctacacaaccctcagaacttcctccaccattaccagaagctacgaacagaagcgcttctgaacagggctcataggttcctgcacagaacttacgaggttcttaacacaattgaatgaggaaggggtgtgtgtctttccccaacgccaggactggattctggaccacctcgttgtcctccaactaggagagaattcactattctcttcacctatcaaagcacagtggatagtttatcgagcagtctttaatctgaggaaggagggctcaaagaccccgggtcttctgatgacctcacagcttggtcattccaggtccccggttcaccttcgtccagtaccctcaagcccggctaggcaaggcttccttcctgcagaaatgcagagaacccaggaaaaaaacaaaagcaagcaaacaaacaaacaaacaagacgccaggcttccccactggagtgcagattcaactaagacccaagacctctgggacataagttaggcccctccttctcaaacaaaacacgccctccagctgtctccctccacctccgctctctcattcctcctccctcctccccacactccatcctcctctccggtcttgccccaagcccctccctatcctcctcccttcaccagttctccccctgctctttcctccagcttctctcctccctcctcccctccagcctccagctcctcccctcccctcccgcccgccctggggccccgcgctcgcttccctctctcccgcccagccttccccgcgttgggcgccgaggctccgcgcggcccgcgcagccgtctctcctcccggaaggcgaggccgagcgtggcggccatggaggcggcgacgcggaggcggcagctcctcggagcggcgggcggccccggtgtcgcgttcgtgcaggccaggtgcgcgcggagcggggacagggaggccgcgaggggccccagagtttgagagacctcgccagggttaaggaaaccgcagggataggctactcgggggccaccccggccagcctggctgagtccctgtgccacttccaagtttttaggaacctcctgctctgggcaagactgtgactctgctctgaatccggtggctcagggcccagggaaagtgggccgttaaccggggacagcgtgactctcccatcctgaatgagagaccccttccctcagaggggagatgtttggggtttatctggctcgacagggcagagccagaggcgcaaaacccgccctttcatcttttcctccagtctgcctccatccgctccactgaccaaagcattcccgcctgtcacatgtattgattaaacacctgtcatgtgcctagcgttgtgccagatggcaaacaggaaagtctgagccaaagcaggtgacagctaattctggagggctttctggagttgaacagtacaagactctgcagaggacagacacttactgccgggcatggtggcaatgcttttaaccccatcactcaggaggcagaggcaggtttctagggggatgtaatccagttggtagtgactgcatagcatgcaggaagtcgtggttcttcccaggccacagaaactggacatggtagacagtggaaggatgtgaggaaacacaaggactatacatactagtgttggacatgtcacacgtgtaagagaaaatcaacgacaggggctggaccaactttaaagtgccctgaatgtcccagagttggccgagaaggccctagagtctgaagttggaggaggcacctactctgggtggggaggctgttcactttgagcaggaaagaccccttaccttcctcacctgagtgacctggtaaaaatgtatattccatatgccacaggtaccaaagagccgtggagagatttgagcactcatgtgcaccaggtgaattttaggaagtccctggcactgtttggaatggtgggggaagttctgggagactgggttgagggcagccttttcatagttccgactggggagcaattctctgagcatgtgctgtgctgcctctggtaacatttctacctggtggtcatcctatgagctctccgtggcgtagtcacagggtagccatcttagtttgtatatacacgtcatcagggcagatttgcccttaggcacattattgagcagcttcttgtcacttgagggtccctatactctaagtattaggtcatcatctctgactgataaggaagtggtccagtgtgcagtaaggaggtgcctgaccagactgaggctcaggctgtaaaacgcccaaaaaccttctacaagttcagcagacattccacaagctgcccccggcactaaggggatcaaaaccatcttccatatttgtggctgtcacggttgttctacctgttatctgtccatcgacgctacagtgtttacattatttaagctgtctttgctttttgtgtttagacagggactctattacatagtcctggctgtcctggaactccatctgtagaaccaggctggcctcaaacttggagatccacctgcctctgcctcctgagtgctataaggtgagtgccaccacagccgtctctgggaccttttctttttttcctcattgtttgtctgcacgtcttcatttttgttgaaatgtccggagcccttctctctactccccgtacacaactctctagacaagccctttgcctttctgccccccaggcttgcagatgctgctgcctggtcctggcttcccagctgtcgaggtgtcagtgccccccgccccgtggtagacttgggaagctgaggaggggagcaggagcaaaggctgggcttgcctcaggttacctggactggcattggctttcgccaagccgatatcctcctccattcagtctgtcgctcctgatgggggcctagaaccaacgtggcctggggggagggggctcagcctgggaagtttggagtcagaacttgggacaagcttgaggttcctcatcttgcggtgttgaggggaggtacctttcccctgtgtgatctgccatcactgtcaaagccccgcagaaggaaacggttggttcagaagtttgcctgtcttttgtctgtgtattgctggtaaaggaaagctttcattaggctgaggaaaagccagcacgagagagaaagccctgcagtgcagagcaggattctgagcatccacgtgtgtgagtctggagtcccgagctcggctcttcccctcatcctgttgctacctctttcccctacctgcccccctaagctaggccgcactaatgtcaggggttctcatttactgaagtgcttcctgggatagagggagaaattgttaaggagcctctagtgtgagccagtgcaccaagtggcctcatttcccccacttccccatgtgtgtgctttcaaaacccctttattctttctcttttctaatttttttttagcagacttaattcttttatttttcttgtacaaaatccttatgtagtagccacagctggagcctgggtcctctgaacagagactctggtgtgatcagtgaattcctgataaggagacttggtgaagacagtctctttccagaggtgggggtcaggtagctgtaagtcttggagatggcatcaaaggtggccttagcaaagttgcccagggtggcagtgcagcctctggctgaagtgtagcagtcatctataccggccatcatcaggagcttcttaggcacaggagcagagacagtgccagtgcctctgggggcagggatgagacgcaccagcacagagccacagcggcctatcaccttgcatggaacagtgtggggcttgtcaatcttgttccccaagtagcctctccgcacagggacgatggaaagcttggccaagatgatggcccctcggatggcagtggcaacctccttggagctcttaacgtgaccactgtagtccccagtagcgacaaaagccttgaacctggtccgctggccagcccgaatctgcttctgcactggcatgattttcagaccctcatcctttagggacgcacccaggaagaagtcaatgatctcagactccttaatgggcagggagaacaggtagatctcctccaagggcttgatcttcatgtccttaaccaggcggcccagcttggtgacggggatccactcttgtcttcagctttacctccacgagccccgcggcctcggccacgaccgtggcccctaagaccactgctgaatcctccgaggaagccatcgcggcctcctaatcctgggcccccgggtcctcccggccctcccgatgcaccggcgtcatccgccatttggtgttttcctgaagaagaagaagaagctttttttttttttttttttcgaggcagggtttctttgtgtggccctggctgtcctggaactccctctgtagaccaggctggcctcaaactcagaaattcgcctgcctctgcctcccaagtgctgggattaaaggcgtgcgccaccactgcccggctctctcttttcttttcttttctttttttctgagacagagtttctctgtgtagtccaggctgtcctagaactcaatctataaaccaggcttgctaggaactcagagaccccacccctgcctctgcctcccgagtgcagggattaggggtacacaacacctcctggcccctttaattctttataccaaacacctcagctcagtctgagctgagggcttcagaatgaaacacaggacaccccttccccgcaactctttaccactcagcttgtttgaggcctgttctgaaagtcataaagaggaaaggacaaacagggactctcttggggcgccgtcaccgcactctgagcagtctgcatctagatacctgaatatctagccctgtcttaggcctggccagctttaccgcttagtctctgataggcctgggatttctgcatgccttctcccccaggcatttttctgcagctcacatgcagctcttcttctggttaaaagtgccagtctttcctttttgtaggttctgcatattgttcctggctaccctgatccttttccagattgaactcaaatgccagccggtttatgatagtgactgcaatagtaagctgttaagagcacagagacccaggcttgagttctgtgctatctagaactcctgcatttccatggcagttagtgtgacctcagcaccgcccaccccaccccacaacccccagcaaaaggtgccagcatatatgccctgaggcagcctgccatgtgacactcgcacacgcgtgtgcacacacacacacactctttctttgaggccacttcactttctcttggctgtctttggagggtggaccttcacggcaggccaccttggggcttgcattctagagagccagcaccagaaggtgctttttccccaattcaccaagccctccccgtggctaacattacctcttgggaaagaagcaagagttgggaaagagataataaaagcagtcatagcagctccttacagcacaagcaggcgacagtggctggactctgacctcagcctcagcatctttgtctaaaagtagtcatagcagctccttataacacaggcaggtgcaatggctgaactctgacttcagtctcagcatcttcatttaaaagcagtaaggaacagccctgcctctgatgccactgcctggggttagctgagatgccaccggtaaaagtcatagcatcttgtacagttggtgatcagtttgtggtgcgggacactaagtcaggggacacgaggctatgctgattgcggaaagcttactctacctgctttgccttgtacaggaccacaggttcgccagaggcctgcctcccttcttctgggtggcttggtccacctatttatctttgggattagggggagctaattagctgagttcagcaaacataggacagtcacaacaacacctacaaaggaccacgtgcccataggggagggatacggaactggtgacagtgatggttttaagtcagcccaagccaggaacagagctgatgtctggaggtcagggatctgcgtcacgcatgcctgttctggctgtacacacaggatagtaagactgtccctatcttaggagctactggtgttttgtctctggatagtaagcttgctgtaagagagacagatgggggaggttggagagttgggggaaccaccatctcattgctaggaattgaacttaggacctctgaaagagcagtcagtgctcttaaccgctgagccatctctctagaccaccctattcgtcttccacatcttgctttgctcctgccatcattctataatggaggcttgacagtgacttccccctggatcagcttcttcctgaaccacaggggatttggggcaactgaaacccacggtcttcttgactacatccagtttcccatctagaaagcatgtatgttctgtcttcaagtgcctagacctctgtctttcccttgggctgatggcaaagcaggaggagagagggctgaccctggtctcttgttcttcaccaggcatggctctgtgaaggccgaggacaaagaccgcacagcccccttccatcttgacctctggttctacttcacactgcagaactgggttctggactttggccgccccattgccatggtgagtgtgtggctgggtcccgttgagtggcctcatggacttcacttcttgtagggaagccagcggcttttatattctgtagctgtgtgactgtccagccatgccagtgagagggtctgggtggggcccagttgtcatcctgtgttccctgtagcccaccttgaagtagtcagaccaagtttaaccaaatcactgagccagacagaaggtttgggaaagggaacagagagtatctgtcctccctcattgtcctctggaggggaagcccgttagctggtttttgcatattataactggccaaatttgtaataattaaaataaagtcacttccaagtagtgagagtagaagtctcaaaataaggaagcgttagaccttcctggtctgatccctgtcccgcctccaaggggctgggccatacccttccattcctttctctggttatgtaaacatatatagaaatttcttttttttcctaaccaaaggaaactttgttttataccccatattctgcaccttgattattctacattaggatatatctctatacaatatatgcaaattgctgtttctgttaatgaagcttaaccttccacactaaacatgtactttgatggcctgtctggtacatggtcttcagagagaccctgtcttaagacaaaacaaacctagctgctaggcacttccagcaaaggggcaggttacaaaattaacatacccaaatcagtaaccttcttctataccaggcaggtacagtcccattcacagtagcctggaaaacaaaacaaaaaaaatgccttgaaataaacctaagcaaggagtgaaagagccacacggacctgcacagcggaaggttcagcaggcattcgacgctccgggcaaccagtgaaataaaacagatgtgactatgatagtgtagtttgggtttaaaaaaaggccaaaggaaaaaagaaaggttttcaaattatgaaggattttagattgtaaatgtgttttgtccttagatggaagattaaataaaacataaaactttaaaaaataaaaattggggggaaaagtgctatcatgtagaggggcctggatatctgtgtatcgtttatgactgggacagtccacttattgactgggggactcagtttctctctgggagtccattaggtctgggactgctaaaggggttccaagagaacacaggaagcgaagcgctcagtgtctgaggggctggtgtcagtggcctgcaggcctccctgtgagtgatgctctctccccagctggtattcccgatccagtggtttcctctcaacaagccaagtgtcggggactactttcacatgacctacaacatcatcacgcccttcctgctgctaaaggtacagactggcctgtctccctcccatcctctccgcctccccctccccttccctctccctctctctctcacgcatgcatgcgcgcacacccgtgtcataagctgtaagctggttcagtgggtcgggggctgccaagcctgatggcctgactttcctccccacatgacagaaaagagaaacaatgcccacagattgccctttgacctttacatgtgtacccatatacatacgcacaagaaatcggtaaatgtttctttaaaaatgagggctggaaagatggctcgtctgttaagagtgctgactgctcttccagagatcctgagttcaattcccagcaaccacatggtggctcataaccatctgtaatgggatctgatgccctcttctagtgtgtctgaagacagctatggtgtactcatatacataaaataagtaaatttttacaaaaaatttaaaatgaaagacatttcaaatctctaacagtaggagattacagtggcctcaagattcagtttctgtggtttttagaacttccacgctcatttcatacaccctgacattttctgtttgctagggcctgccactcaaaactcagatctgtgcatcatgctagcccacctaaggcacacataggacacactgaggtagtggaagggccaggcctggtcaggacgcctaccttgaagctctgatcccgcctctaactcttccacctcatgttcctggagaggaagtgtgagttcgtcagaccctgctgggtttacactccaccatgatcagtagctaggctgccctgctaaggaactcacaacttccagagggactttctatcccgtttttttttctgagggaagggttatcacacatcgtaattgaggcaggggcatgccatggccctcattcttcacctcagcttattgagcggtccccccgaacgctgccgcggtctatagtctatgtcagcatcatcactttcatcatgggagccagcatccacctggtgggagactcagtcaaccatcgcctgctcttcagtgggtaccagcaccacctgtccgtcagagagaaccccattatcaagaacctcaagccggagactctggtgaggctgcctcccctgccagtcctcatgactcctgtagcccaggctgaccatagattgtataagtcggcaagggtgaccttgaactcctgattctcctgtctacctccaaattacaagcatgcacctaagtgagggaaggcactgttgtctactgtcacccaaactagtatgctcctaattgcaaagggacacggtgtctgactggctgtggggtgcacgtctataaccccagcactcaggagactaaggggattgctacaagttcaagaccggcctggtttatatagcaagacccagtgactggctcctcatggcccatctggtaccctagggagggaatgagaatggtgtgtgtgggtggagggtagagaaagccacctgggagcttgggtaagatcccagctctgcagatggagatgccgtggggtgagttgccctaatcccctaatcccttccatgttccaaggaaggagctgaagcctggggttgggggtggggagcaggatctgctggnnnnnnnnnnnnnnnnnnnnctctaggttccatccagggtccaggcaccaagagatactggacaaggctccctggatcccaggtctccagctattgagtggaacatctgggatggtattctctgctcagtgaaggttttatgagtgggacccctggtcagcatgctaggaagacccagctactttcctttggccttaagggggcctcctagagcctccttcctacatgaagttcccacagcggccactagagggcagcaagcagatgctcgtcctcatgagcctggggttggggagggtggagcctagtcctgataaacaaacacacagagagttgtgggtctggtgcaggagacagttgtgggcgtagaaagctgagaagatccagcagggccaggtctgggtgccacagattgtattccccatcttagaacattctcccaggggaatctctctaccatcgccactactgctgctctcaggaaaatctcaggcatgagaggtcagagtcagagacacagggctcaagtaaagggtttcctcttccttcatcctacacaagatgaactaaagccagaggaaagaggtgagagcagttgttagctaggaggtgatgggctagcactgcgaggcgcttccctccacacatgcccagcactggtgtctctgggtctgtctgaggttataggtcttcatcctcttggttcagaaaggcctctcttgccagctcttcctgaccttgacagatagatgactcctccctttggaagtagggagaggaggaacaagctgagaactcaggagaggttgggggggtggactggggattgagggtcggggtgtcactggacagaaaacggttgcatgtgagcaggagtgatgagcaagtgtgcctgtgtgtgcctgtgtgcttgcgcacgtgtgtgtgtgtgtgtgtgtgtgtgtgtgtgtgttggaatagaaagggagccctccgtgtggagggggagaagccatactctcggatgggatagagactgtgggctgagggtgagtgagggccttcacagctctccttggctcccccagcactgtgttctctcagacctcagccctgctgggtagcccagtagccaggctagtgtggcactggacttgctggtatttgagggacatggatgggacagagcctctcatcccctcatctccatgtggaatgaaggacagggcgggcaccaagcccagagagggaaggcaggcaggaggtggttaccatggcgcccactccttcccctcagttttaacacaggagcctttgcatgagagttaccttttagtttctgttcctcccaccttgactcttagggcagaaaaggctggaagtagagcagtgtgcatgacatgccaacacggtgacacactaggaccagtgggaaggtggtggggacagcccctggccaggcgtgtgaagctgttgcctctctgtcacaggtacatccccttcttcctcatcctcttcatgtacttcagtggctgtttcaccacctgcaaggctgagagccacatgccaggacctgccctgctcctggtggtgcccagtggtctgtactactggtgagtggacattggcacatggggtggacaaagggcacaagcactaactgagccaccacagtaaaagcccacacatagaagccgggcgtggtggcgcactcctttcatcccagcactcggcaggcggatttctgagttcaaggccagcttggtctacagagttccaggacagccagggctacacagagaaaccctgtctcgaaaaagaccagagaaagagagagagagagagctgttgctagacaccttgagaggtggggatgtttatgttgttaccctcaaaagggagaaaacagccttgaagttgtcattcaaagttgttgcatgatgtccccaaggtcccagaccttggttgtaaagctggagtcccttaagtgaacaggtcggcattagggtgccctagaggcagacaggtaaccttgtagaagctaccaagtgcctctgagtgttctatacgcggggttgcaacaactctagatgtcagtggtccagccttcaaggggacagtaatgacaatagtctccatgtcttgggatggaatccccaaactcaattgtctccagaaaccaagctggcaagagatgaggccccagggagtatgcgaactgagaccatgtgttgcacggtgttctctgcaaagagtgcattctcttgctcctccagagccagtttttatcacgtggaagtgttctaatgcggtaagaaaagccagagagatggctcagcagttaagagcagattgctcttccagaggtcctgagctcaagtcccagcaaccacatggtggctcacagccatctgtaatgggatctgatgccttgttctggtgtgtctgaagacagtgacagtgtattcacatatataaaataaataaatctttaaaaaaataaagaaaagaaaaagaaaaagagaagccagaaaccaaagtccagatatcctgtgattctcagtacatagccttggaacttgctgtgtagcagcagccagagacctacctgtctgcctctgcctcctggacacagtgcaaacccatgagccaccatgcccagctgagtattattattatctttattgttgttatgaaacatgtttgcagctctgtatataggtctgactattctggaactcactctatagatcaggctgtcctcgaagtccccatgttgggattaaagtcatgcaccccctcatctagctaaccagcagagtatgattaaaccactcaaagtcagagcagtatgacgcctctgggcacactcggtccactcactaggtgagatgttccgattgactgggagggcagcctaggacttggtccaggaggatgccagagatggtgttgccatggcacccacttcacctccacccctgttctctttctccaggtacctggtcaccgagggccagatcttcatcctcttcatcttcaccttcttcgccatgctggctctcgtcttgcaccagaagcgcaggcgcctcttcctggacagcaacggcctcttcctcttgtattccttcgcgctcaccctctcactggtggctctgtgggtggcttggctgtggaatgaccctgtactcagaaagaagtaccctggtgtcatctatgttcctgagccctgggccttctacacactccacgttagcagtcaacagtgaggcttactgggggcaccaggccatggtgtttgtacatgtgtgcatacatgcaccgtggtaatgtgaactatgcactggtggcagggatggacagagtgtgctgttgagagactcaactgttctggtcaggttctgagtttgtttttttcttttctttttttcccccctttggacttaagatggaatttagtttggggaagtatatgaaggccaagatcccggcccctgccctcccctgtatttcattactattagaggtgcctgaataacacccctatctctcaggactgggctggccttatggagatatcttctggtgacaagcgggtgagggctgctcagggcagaagcaggagactctgctacctgtccctgggccctaggtttctgggtcacaacttcttttgtgctttaaacagagcagttccatctctgggcttcttttgctgtggtgggctccatagtttatgtggctctggggactggtggttgctgattcccttagggagcggcagcacggaagagtggttcttttactgtgcccccgcccccaccctcagcctaggggtatgtttctcccagcctcttgtccaacttcacaccccatttatatgctgttgagaacccagtctccagggagccagaggcccccactcccagtctctctcagctaagctctctaagctggcctgggttctgagctacatggaaggcagagttctcaagcccttgttttatagtttcccccgaaaccccttgtaagggtctgagacaatacaagtcagactcttgagacagcacatctcagcctgaatctctcaccacctgcctggtgcctttgttcccagcatggtggctcctccccagcccacttcctcccaggcctcagatataggtctccttggcacaaggcgccaccacctcatttggcagccagcactgactgacctgtgctgtgagtcttggagacactccatgcatggccctgcctcttttctgctgttctcagggactttgcctcagtttccccttgtgatctttctgtgggttagcccatgctggggtaggggtggtgacaggggtgagaggcttaaataaaggctgttttgaagcccagcatgggccgtggctgtttctagctttgggaatgtggtggggaggcaagtgggcgttctgcactgagggagagacttgttggtctggggtcctaggctttcttttatggcagacctgagggacttctgccccccccccccgactcaacaccactcaatactgtgctccttagaggcgtctatgccagtgaagagaaatggagaccctccaggcccggcactcggctgtcacacaagttgtcccagtgctgggagacaatgagaagctaaaggacgttcatgggaggnnnnnnnnnnnnnnnnnnnnnnnnnnnnnnnnnnnnnnnnnnnnnnnnnnnnnnnnnnnnnnnnnnnnnnnnnnnnnnnnnnnnnnnnnnnnnnnnnnnnnnnnnnnnnnnnnnnnnnnnnnnnnnnnnnnnnnnntcctaccatgtctgtcctctcagccacccagcacatgccctgcctgcctccaagacactgccatttcaggactagcatcagaaggtctacacagctatctcctaggtagggacaggcctagtttgtggagcctgaagactatacattttggggaacccatactaagaaaacagtggggactgggcggtggtggcacacggctttaatcccagcacttgggacgtagaggcaggcagatttctgagttcgaggccagcctggtctacaaaagtgagttccaggacatccagggctacacagagaaaccctgtctcgaaaaaaaaaaaaaaaaagaaagaaagaaagaaaacagccggaagtatgaagtgtgggcagcgtaggccagaggacaacctcaggcgtcctttaggaaaactagtcaccttatttttgagacaggatcttttttttttttaaagatttatttatttattatatgcaagtacactgtagctgtcctcagacactccagaagagggcatcagatctcattatggatggttgtgagccaccatgtggttgctgggatttgaactcctgaccttcagaagagcagttggcgctcttacccactgagccatctcaccagccccaagacaggatctttaattgtcctggaacctgcccattagactagcttccctggccagtgcgcttcagggacctagcaatctccatttccgcttgcctggattataaacacagaccaccacaccggaagtttttttttatgtaggtactggggggtagaactcgagtccttgtgcttgcaaggcaagtactttagtgactgaaccatctcagccctaagggaacattttaaaatactcaccaaagcaagtatttagaaatagcgagttcctggagccttgggccatgtgtgcctcttggacagttgactaggaatgtcaccctggatggagcctggcttcatctcccaggagttctaccatcaagcttctagagaattggttcccagagtacaacaggttgtaggagaaaccagaactactcagaaagtggggatgggccctgcaggccactctgcaggtgggctccttcggggaccaccactctaggtcctggctgctcagtgtggctccagactgcagctacagcttcttctggaaacggagcaacagggcatcttgactcctctctgggctgtacctagtgggatccttagggtcccagttcctttctgcccaggcatgtgtgcagtccacatgactttcaaggctgctgtaaggtgccatgaacgtgatggctgcgagcagcccatgtctatctgttcagttctgggggtgaggtactgacaaggctgtgttctcatgggctctagaggatgtctcttcgctgcctcttccagcctgtggtgggacctaggtcatcgtgggtgttcagggctgtgagcccattactcatggccctctctctgtggtgtggctctccttggcttagcacctaccctgtctgctctgtatgacctcacctcgcctacatccacggaccctacttcagatgaagtcccttaggctttaggtagacgtggattccagggacactagttagctcaggagagccctgaaacaaaaggatagataggatggaggcaggggaaagcaaagtctgaggaccacttcctgcccttccacactttacacagatgctttgccaagactcacttgcctgggtgtggggaagaataaggactgccccattatactccaactctgagagacaggagcgcttacctaggaacacagttccataagaaagcagcaaggggaagaacatggcttttgggtgagagcaggatttagggagacagggctggggccaggaacttagtgtcctgcagtccaagctgactgaacttctgatcctcctgccttcatcctcttactggacttacaggcttgcacaatatgagttatgcggtactgtgggtcaaatgcagggcttgcatgctaggcaaatgttctaccaactgaactgtatcctgagcccctaaccccatataacctaagacattcctgggagactcttatagacaaagtagcctgggtggagaggaaaggccccttgcctaaaaccccttccacagggagggatgttagtccagagagtggtaaagaggagccagcagaagtcggtgaagtccagggggaggtgctggccccacgccaggagggccaagctttgggtataaagtgaataaactcagccccaagtggggccggaggagtttcctgttgcagttcacatggagagtcccacatgcagagcactgtgcagcttggtaggccacaccatgaggccactggcagtcacagccttggagccggtatttagccagctgaaacagcagaagacaacccctttgtcacccacaaatagagggacctgagtgtggctgcaggcatctgatgtgtacttgggaggtagaaacaggaggatcaagagttcagagccatcttcaattatacagtgagtttgagggctccctgagccactgggatcctgtctcagcacaacacaaacgggtcctggagaaaggactctgagcatttactgtgtgtgcagaggacctgaatttggtttccagcatccatgcagggtggctcacaactgcctacaactccaccttcaggggatctgactccctttcatggtcactgtgggcatctgtacacaaacatacacacagccatgcaaacatacacataaataaagtgtatgtatatatatgtgtgtgtatatatatatatatatatacactttaaatacacataaagtatgtatatgtgtgtgtgtatatatatttaaagatttatacataagtacactgtagctgtcttcagatacaccagaagagggcatcagatctcattatgggtggttgtgagtcaccatgtggttgctgggatttgaactcaggaccttcagaagatcagtcagtgcttttacctgctgagccatttctccagccctaaaagtatattttttagaaatacttttctggccaggcatggtggcacacgcctctttaatcccagcactcgggaggcagaagcaggcgaatttctgagttcaaggacaacctggtctacaaagtgagttcagggctacacagagaaaccctgtcttgaaaaaccaaaaaaaaaaaaaaaacaacaacaacaacaaaaaaccttttctgtctggtggcagccgtcaggcaagccctggtatgcacatacaagtacagactacagagcagtggttctcaatctctcaatcgtgggttgtaacccctttgggcctttcacagagatcagatatcttgcatattagatatttagattacagatccaccacagtagcaaaattacagttatgaagaagcaatgaaaataattttataggtgggtcaccataacatgaggaactgcattagagggtttcagggcgaggaagggggaggaccagtgctatagaggtgacctgacatcctggcatgatgcactttcttcagggcccactgctagccgtatcaccaatgccctgtgttccaccgggcattagcttcacgaggctaagcaaaactacattagatgcaggactttgtgttcacagtggaggctgcgaacacccaattccttagagtgcaacttagagtaaacctatccatcataggcttaaccagctaaagatggcctggtcctcagtactgtgtggagagagctggactccattgtgaattctgagcatcctgaattcttacggggctgaaggcttcatacaggttctttgaggttctcctcacagacccactacttcataagttaccagaacaaatcctggcactcactggatcaccgaaccagtgcataagcaccaagagatgcctggactgccgtctgctggccacaggagctctggtctctgaaagggaaaccaagttctgacatgctttgagtgtttctcaccacacacttggagagcctggagcactctccagctccattagtgatgatataaagaatgttcataaaatctatactagtaaatgatttaggacggtcatgcatgcgcgtacgcacacccacacacacccacacaccaatggaaacaaaaccaaacaacaaaagaagggagagttgacaggtgtcaggatgcccttaggggcacatggctgaccccagtactcagttactaaaacccaagaagatgcctcacccgcctctgagcccatcacagaggtagggtatttgggggcctcagttctgtacccacctgtcaaaaagtactgcctacctcccttgctcttccatgacaactaaactgtgtccccccagccttccccactcccaccatacccaccccccaccaaacctaggcccccaactatacctacccctccatacctaggccccaccatatcttgcctccccaaccatacctaccctccaaatcatacctaccccccacaaagtgggtcagaacctcaagattctcacatctaaagcaggtaagaagaggtagatggctcaggagaaaaaacaaaaccattccacatggaggtgtcaggaccagagggaggccatgagtttgtgtgccctcagatgggttagcaggagaccttaactctcttcctctggcacctgcagcctttggtagctctcatttgctcccttgctccctgtgtagtacacaggctatgtgaccacacacagtgactgacagttggaccaggctggatttagcactttgtaggcaaaccagtcaaggagtgtggatgagggaaaggagactttcagaccaacctgagaacctagtcatgcccagggcccagtaccagttctaggaggcaccctttttcctgtctcaggggacggggagaggaatagagggctgagaaattcagagtcagcagcttattataatacgggaaagggcgagacgaggaagggagaggaacttcctgcctggtcaggtcaaactccaagttccctgagcggctagcttaagactcagccccagcacccaacaccatccccagcccctaggaagtagaattggctgtgtattggcctttggattatcctagcagcccataacgtagctggtgaggaaactgaggcatacaagagacggacggtcctcagcgtgtccccagacatagtgcatctgcaaggctgtgtttgaagcgtctctgagcactgctcccttggatagcttcttctggagagaccgtgtgtgtgtgtgtgtgtgtgtgtgtgtgtgtgtgtgtgtgtgtgtgtgtgtgtgcgcgcgtgcgtgtgcgcgcgtgctatctggctccagcaaggagcccagcttagcctcgggagagagcaaagcttcctaagacagactcagaccaggacagagtcagccccacccggagccccctttcagaagttaggcttccaagaaggaacacccaaattgtccagttgctgcagagccccagcctccgggggcaggggcctccaggagagtctgtaaatggtttcctcacaatcacccttctcaggacggtgggggcatccactactcagccggaatttgactctcatggcatagagcccggtctccgtggcagcggaggatttattaccaggcctccgcccagcatgctggactttcgactccaagctggagtaaagagaaccaaactcagttccaggagtaaggggagcctgaggatggtgagtgaggggctgtgccggaaggaggtgggaagggcccccgctgaagccccctcttgactgttctttctctgctacaggccaagttcctttcccaggaccaaattaatggtaggttgggtttgttctttaattagtaattcgccacaaaatgtgtgtctcattaggcaatttgctttgctgggttttgttggtaggaaggaaggccccgaggggtggacagctggcccacccacaggcttggggccaggtgctgtggggcagctggttatctgtttgggggtggccctgaagaccgactaactgacttccagggcttgttatatgtcagtgtgactttcaagctgggtcataaaagtgagcttgcttagtgctccagagagcctggaaacgggtctgggtgggaggctggtcatggagaaaggtcactaacatagtaattgaaccagagatgggggatggggctttgtagtcagtgtagacaggcaacagaactcagggttacacgctggggcaggatatttctttatggaccttagactgtaaaatgaggggctcagctggcacctcctgcctagttcagtgtgggcaccttgttcttgggcttcccacagagcagagttctgtttccccaagagcagaaaggcagaattaagttacacaggacctggcaaacacctggccagggatctggtggctgagtttctggcagagaggccagagtgcagcacaggccctttacgggataactctcttttccctgaggctgagcccctacacctgccccaacataggagggaaacagccttggtaacccccttctcattgccgctgacatgacaccttgtcggtgagctagaactgcaggtacacagggacacggagctctggtgcaggacactgtccagcaggccacagggggtggcttctggttaccccagcaagggatctattcccagagatgtaaatgactagannnnnnnnnnnnnnnnnnnnnnnnnnnnnnnnnnnnnnnnnnnnnnnnnnnnnnnnnnnnnnnnnnnnnnnnnnnnnnnnnnnnnnnnnnnnnnnnnnnnnnnnnnnnnnnnnnnnnnnnnnnnnnnnnnnnnnnnnnnnnnnnnnnnnnnnnnnnnnnnnnnnnnnnnnnnnnnnnnnnnnnnnnnnnnnnnnnnnnnnnnnnnnnnnnnnntcctcaactccctatccccaaactaaggtcccagaaacagaaggggacagtgaggagactctgctacacagagcctagcccacagttaggggccaggggctggcggacaatccactatgggagaatttgtactgctcttgcagaagacctaagtttggttcccagtacatatacaagaactgatcaccatcacctgtaactccatctcccagggcaaaggaaacctttggcctcctggggcacctgtatgcgtgcatgtgcacacaatggaaagtaaagtctttgaaggggggacctaagctagaggccacctgtcagcctcaccagtccccctactctgtctggacaacggactcactgccccctcgctcccatggcttttgaaacaactagaaaggaagaaggcgaattctctttgtatcccagtgtctaacaccaagaaggtggccatgagtgtttagagttggaagcctggacagggttgggcgaggaatggggctttggaagctcccaggccagtcacctttgagtctcagttttcttgtctgagaagagggtcaacgatgcatcctgatgtgtttacctcacttctactttacttcagcaagagtcctttctctgtgctaaccctgccctgtgccagcccttccccaggtgttaaaaactgagcagggggccggaaggtaccccccattcttggggtcacaatcaaggagagtgaaagacagaatggacagcagtgaatgaggggtggggccacactgagaggactggaggggtgtgtgtgtgtgtgtgtgtgtgtgtgtgtgtgtgtgtgaaggagactgaggatcggggtcctcaggcaagccaggtattctggggatcttgttatcttggtctagcatagtgagaaaagactgcaggtactgagggcccaccaagcactgtgatgcaggacagtgtccagcaggctccagaggtggcttctggtgacccaggaagggatcccagcgttgtaaaggaccagagcttggacagatggcggaggggagggagaaggcggaaggggggttggaggcggcagctggagagatggctcagcagttaagagcacctgagagagggagataggttccctgcagtcacgctgggtgactcaacaccacctggaattccagctccagggaatctggctctgcaggtttgaagagatggatgggggctggagagataaaggcacctgcccccaagccgggggcgggggggttcctcccagcccagcacatggtggaaagaaccatctcccccacaagatactctctgactcccacacatatatacactaaaaaaaaaacaaaataaacagtgatctggagagatggctcagctacagtgtactcatatacttaagataaatcttcaactaaaataaaatgtattaaaattcttaagagaaaaaagaggggctggagagatagctcagaggttaagagcactgactgctcttccagaggtcctgagttcaattcccatcaaccacatggtggctcacaaccatctgtaatgggatctgatgccctcttctggtgtgtatgaagacagcgacagtgtgcccacatatatgaattaaataaagaaatctttaaaaaattaagaaaagaaagaaaaggtgggtctgtcaatgctggaagagaacacatatgtcagtttgctcagaggctggcctctgtttaatccttgctctaggccctggttaccaatataggggaatgcagtgtgcttgtctggacagccagcagatcctgctccccacccccaaccccaggcttcagctccttccttggaacatggaagggattaggggattagggcaactcaccccacggcatctccatctgcagagctgggatcttacccaagctcccaggtggcttggctttgcctccaggggccccagagggaagaggcaggacagataggacagctttgccaggtgtgcagcagcagcagggaagaaaggacagcaaaaagagccatgggccagctctgccgagccctaggcacccttcccggcagttccacatcgggaccaggacctgcctgaggacaacattagagttcaggagccaggtcctagacaagtgagaaaaagtagccacactcagctctgacaatgataaacccctgcctaagagagcatcagagaaccactgcccgccatttgcctcctaggggattctgcagacagaggtgagactgtctcatcaatgttacaaaggtccccggagtctggcagccctaccaacttttgagtggcatcttaaggaagagagaaggcaaggaggggaggcttactctacctggaactgcagctccagggcatatccacccttctggcatcttgggtggcttcacccatgtgtcactcactcatgacacatacaaataaataaaaataacacaaataaatcttcaacaattagctcatctttctctgaattctatttgacttgttggttttatatctgtatgacattcatgtatttatgtagtgagtgtgtatacacatactgtgaatgtcagaagacaacttgcaggagttgctttttcttaaaccgtgtgggtcctgggaatcaaattcagacttggcggc

SEQ ID NO: 2269 - DNA, 1848 bp, Mus musculus
gcatggctctgtgaaggccgaggacaaagaccgcacagcccccttccatcttgacctctggttctacttcacactgcagaactgggttctggactttggccgccccattgccatgctggtattcccgatccagtggtttcctctcaacaagccaagtgtcggggactactttcacatgacctacaacatcatcacgcccttcctgctgctaaagcttattgagcggtccccccgaacgctgccgcggtctatagtctatgtcagcatcatcactttcatcatgggagccagcatccacctggtgggagactcagtcaaccatcgcctgctcttcagtgggtacatccccttcttcctcatcctcttcatgtacttcagtggctgtttcaccacctgcaaggctgagagccacatgccaggacctgccctgctcctggtggtgcccagtggtctgtactactggtacctggtcaccgagggccagatcttcatcctcttcatcttcaccttcttcgccatgctggctctcgtcttgcaccagaagcgcaggcgcctcttcctggacagcaacggcctcttcctcttgtattccttcgcgctcaccctctcactggtggctctgtgggtggcttggctgtggaatgaccctgtactcagaaagaagtaccctggtgtcatctatgttcctgagccctgggccttctacacactccacgttagcagtcaacagtgaggcttactgggggcaccaggccatggtgtttgtacatgtgtgcatacatgcaccgtggtaatgtgaactatgcactggtggcagggatggacagagtgtgctgttgagagactcaactgttctggtcaggttctgagtttgtttttttcttttctttttttcccccctttggacttaagatggaatttagtttggggaagtatatgaaggccaagatcccggcccctgccctcccctgtatttcattactattagaggtgcctgaataacacccctatctctcaggactgggctggccttatggagatatcttctggtgacaagcgggtgagggctgctcagggcagaagcaggagactctgctacctgtccctgggccctaggtttctgggtcacaacttcttttgtgctttaaacagagcagttccatctctgggcttcttttgctgtggtgggctccatagtttatgtggctctggggactggtggttgctgattcccttagggagcggcagcacggaagagtggttcttttactgtgcccccgcccccaccctcagcctaggggtatgtttctcccagcctcttgtccaacttcacaccccatttatatgctgttgagaacccagtctccagggagccagaggcccccactcccagtctctctcagctaagctctctaagctggcctgggttctgagctacatggaaggcagagttctcaagcccttgttttatagtttcccccgaaaccccttgtaagggtctgagacaatacaagtcagactcttgagacagcacatctcagcctgaatctctcaccacctgcctggtgcctttgttcccagcatggtggctcctccccagcccacttcctcccaggcctcagatataggtctccttggcacaaggcgccaccacctcatttggcagccagcactgactgacctgtgctgtgagtcttggagacactccatgcatggccctgcctcttttctgctgttctcagggactttgcctcagtttccccttgtgatctttctgtgggttagcccatgctggggtaggggtggtgacaggggtgagaggcttaaataaaggctgttttgaagccc

SEQ ID NO: 2270 - protein, 237 aa, Mus musculus
HGSVKAEDKDRTAPFHLDLWFYFTLQNWVLDFGRPIAMLVFPIQWFPLNKPSVGDYFHMTYNIITPFLLLKLIERSPRTLPRSIVYVSIITFIMGASIHLVGDSVNHRLLFSGYIPFFLILFMYFSGCFTTCKAESHMPGPALLLVVPSGYWYLVTEGQIFILFIFTFFAMLALVLHQKRRRLFLDSNGLFLKFALTLSLVWVAWLWNDPVLRKKYPGVIYVPEPWAFYTLHVSSQQ

SEQ ID NO: 2271 - DNA, 42746 bp, Homo sapiens
caaggtaatttattcactaaattcactaaattaagctagtgaattgtgttattcaaatctttcttgactcatcaataattgggagcattgtattgaaataccccactatgtctgtggattagtcaatttcatttcataattctataaatttttattttatatatttggatgctattttagtaggtacccacaactttagaactattacatcttcctgataaataaaaccttttatcattgtataaagtccttatttatctcttatagtctattttgtcaaatgacaatatagttacaccaactttcttttaacttcaggttggcacaaaagtaatagcaaaaaccacagtttctttttcaccaacctaacagtattgcctgttatatcttttttcatcattttactttcatcttttctgtgtccttttattttaggtatgtctattttttttttaatttaggtctaagaatgtgtcttttagtttattgtttagtccatttatacttattgtgattactgatatatttagatttttaccatacccttttttggctttccatttgttttccttttttaaacttatttttttcctttttcttctgcattgggtttttgttttcttattctattttactttttactggtatggaagttacacattttctgtttttagtgattacccttgaaattttaccatgcacatttaacaacatctaaagtgaacaaatacttgaaccttctctaagaagaatacaaagaacttagaatagtctaactctccccaccaacctcgggccttcttcccccatctataaatattattgtccagtatttgtttctgtccttttttaaccccacaaattatacaccatcatcacctttcattataagtttttgcagacaatttttggaattatttacatacttaataattgatttgctcatcattctttcttgcattgcaatgataagttatatatttttagaaatgtttcccttcttctgcgatcattttccttcctcctaaagtatatcttccagaaattgttttagttaaggcctgttagtggtaaaatctctcggttttattctgaaatgttcctatttcaccttcatgtttctattttacatgcatttttgaaagacagttttgctggcacacaattctgggttaactttctcttaacactttgaagatatttttctgtcttctaaattcactgttgctgccaccatatagtttttgtttctttgtaaacaaggtttcttttctctctggctacttttaagatctttgcttttggagctttgtggtttctctacaccatgtccagatgtgggtttctttctttttctttttttttttgagacagagtctcactctgtcgccagctggagtgcagtggcgcgatctggactcactgcaacctctgactccctgattcaagtgactctcctgcctcagcctcccgagtagctgggattacaggcacgtgccaccacacccagctaatttttgtatttttagtgcagatagcgtttcaccatgttgcccaggatggtctcaatctcctgacctcgtgatctgcttgccttggcctcccaaagtgctgggattacaggcgtgacccacttctttttttttgagacagagtctcattctgtcatccaggctggagtgcagtggcacaatcttggctcactgcaacctctgcctcctgggttcaagtaattctcctgcctcagcctcccgagtacctgggactacaggcacccaccaccacgctcagctaatttttgtatttttagtagagacggggtttcaccatattggccaggctggtctcgaactcctgaccttgtgatccccccgcctcggccgcccaaagtgctgggattacaggcgtgcgccaccacaccaggctgtgaggcacttcttgatatgtgctgtctttcttttatctgtgggctcatgtcttttattagatctggaaattcttatccagtagttagcttttcaaatattgcttctctcttattctctctactctctccttctgggattctgattggatattttttagactttctcattctaccctttcttctcttaactcttccttcatgtttgtcatctccttagcaacctgtgctgcattttaggtaattttgtcaatctgtcttttggtttaccaattcactactcagctttatttaatctatagtttagcctgtccactgagtttttgttattgttgttttgttttgtttcattttgtttttagagatggggtctctgttgcccaagctggggtttggtggcacagtcatggctcactgcagccccgaccttttgggctcaagggatccctccagcttcagcttcctcagtagctggaactaccggagcatgccacaacagtggctaattttttaatttttttttttttgtagagataggggtctcgctatgttgcccaggctggtcttgaactcctagcctcaagtgatcctcccaccctgcctcccaaagtgctaggattacaggtatgagccattgtgcctggcctccattcagttttttttttttttttttttttttttgagacggagtctcgctctgtcgcccaggccggattgcggactgcagtggcgcaatctcggctcactgcaagctccgcttcccgggttcacgccattctcctgcctcagcctcccgagtagctgggactacaggcgcccgccaccgcgcccggctaattttttgtatttttagtagagacggggtttcaccttgttagccaggatggtctcgatctcctgacctcatgatccacccgcctcggcctcccaaagtgctgggattacaggcgtgagccaccgcgcccggccgcctccattcagttttaatgtcaacaaattgttaagctctaaaatttctatttgcttatttttcagatatgtctgatcaattgcaaaggtctttgccttattttcttaaataatagctttattgagataaaattcacttgtcataaaattcacccttttgaagtatataattcagtggtttttagtatattcacagaagttgtgaagtcattaccactacttaatgccagaacatttataccaacccaaagaggaatcctgtatccattagccatcactatcaacttccttctatccccattatgtctactttctgtctctgtagatttgcctattctggacatttcatataaatggcctaatacagcatatggccttttatgacttgcatttttcacttagcataatgtttccaaggttgaaccatgttacatcagtacttagtgccttcttatagctgtataatagtccactgaatttgtataccataatttatttatttacaagttgatggattttggagttgttctcacttgttggctattatgaataatgctcctatgaacattcatctgtaagtttttctgtggacttttttttcagagctcttggtcctatacctaaaagcagagttgctgggtcatgtactaactctgtatttaacagtttgaggacctgctggactattttccaaaggggctgtgccattttataatcccaccaggaatatatgaaagttccaatttgtccacatcttcaccaacatgtgttattgtttgtctttttcatcccttgctttttcctgtgataccatgttttatttatttaaacatttcctacctagttattttaaatctgctattcaatcatttcaataaccaaaaagcttagggctctaaatgtgttattttttgtcatctgttctcattcatggtggcttgttttcttctgtgtttaatacattcctggagaaatgcaaggaaggacttttgtttcattcattgctatattcccatcatctagaaccatgactgaaatctaacaggtgcttaacaaatcattgttgaatgaataattgggttccaaggacctaagcaggagagtaaaccccaaatagcatgtacatttgcttcttctgggtgccagggtgttgacaaatacagagctatgttagcctctgtcagtcagtgtctggttaggaaaacagaagccctgtgccctatgtattccatcgattaatcgatatatatatatatatatatatttatttttattttttttttagacacagactcgctctgtcacccaggctggagtgcagtggcacgatctcggctcaatgcaatctttgcctcctgggttcaagtgattctcctgctgtgggtctcctgtagcactctaataagtcattaaattccacaatttgactatacagagctcaggttgacaattctgaaacaatttcaaagcagatattactcgtggctcaccgtggctgtggaaagacctccctccagcctccatggcctctccgttcaggcagttgtgtggtggtttttggagaatgcaggtcccagaggcaggctgcccaggtccacctgtgactacaccatggacaggctgtgtggtttggggtagatgactcagcttctttgtacctgagttaactcatctataagcaggagccaaggttagcgctatcccttagggctactgtgaggattaaatgagataatacacattaagcactgagatcagggtttagcacacaggaattgtacaataaatgtctattggttttgtttgttttgttttattctttttttgttttgttttagacagaatctcactctgtcacccaggctggtgtgcagtggcacaatcttggctcactgcaacttccgtctcccgggttcaagcaattctcctgcctcagcctcccgagtagctgggattacaggcacctgccaccatgcccagctaattgttgtatttttagtagagacggagtttcactatgttggccaggctggtctcaaactcccgacctcaaatgatctgctcaccttggcctcccaaagtgctgggattacatgcgtgagccaccgcgcccggcctttgtcaactgttaagagtgaaagaaattataaggaaaaagaaatgataaggaaaagagtggagggctctgggagcctctcagcttctcctagctctcagcagcagacgggaggggaacgggctagcagagagcaattcagctctgggctgtcatggggacagcaggcttctaggcagggtctgaatttatagccacatgtaaaaggcagtgatctcttccattaatgggtggaaatagagccctatattagggcttttgttcaagttgcaaactcagggccgtgaactatacacttctccttcccttggctgtctggttagagaaggagcagccatatcggtacactgcctggctcagggtgggcactggctcaagccatccaatcagaatccctccgcgggaattttgaattgggcccagaagaggccacccacattctgcttatctcttggatggaagaaagataaacttgggagctgctgactgaggccgtcggctgctgtatttcctggaaagccaggaaagccagtctgcagggagaaagagagaaggatgacatggaaacagtgttgtgggtggtgccttcctgggctcccaaagtcccagcaccattctcagttcctgaggcccaactgcatccttatgcttaggttccctaagacacccctaaatccttgtaatagaaatccccttttgtcatcaacctgtcccccgtggcttctagtaatcacaaccacaagaatctgaattaaacacaacctggggaccttctctctccccacagtgtgacttctggtcaccctcccagcttcttcagccagatggggagtgtcctgcaggcaataccagttgacacagaaagacagtctccatcttcccccagtgccccagtcccttgctgtctgtccttgtgcagccttctcactgtgcacagtcttgttgcccacacttagagatcccctagtcaggcccctcctggctgcctctctccaaagtaactgagttttcctggtcccacttcgtctgtctgccttctggagtcccagcctctggatccaggattctgtgtgtcatgtctctcagatggtagctgcagtctagcaggggccttcaaagccttctggtggcagggcagtgtgggaagatgttttgaagaaagagaaattttcaaaagctcttaagagactggatagaaagggtactggattaggagtggagactggattctggcctggcttggcttctaactcgctgtgtggctttaggcttcattttccgcagctgcagaatgatgaaattaggcaagatcaaaggctttccagggagccctttggaggtgacttggccacggccttgtaaccataaggggagaagagatggcacctgggaccctgcttctcttcactcagggcaccaccccccccacccccccgtaggtgtttcatacattgagcatgctggaaagatctttgtcttagcccaggtttccaaagaagcagagcagggcagcatgtatgctaacactgtattggggagtgtggtggctgggaaggggaagtgaggacaagggggagtgagacagaggagaagggagggcacacaagagagtgcactgcggagctggccaccactccgtctggaaggatgctagaccttacaggaccttctttattatttatttatttattttgagactgagccttgctctgtcgcccagactagagtgcagtggcgtgatctcggctcactgcaacctctgcctcctgggttcatgcaatttctcctgcctcagcctcccaagtagctgggattacaggcacatgccacgacacccagttcgtttttgtatttttagtagagacagggtttcaccatgttggtcaggctggtcttgaactcctgacctcacgtggtccacccaccttggcctcccaacgtgctgggattacaggtgtgagccactgcgcatggcccaggaccttctttaaagtggctgtgtgaactcggaactcaggccagtctgtccagaaagaggaagagagaaaaatttatttgctaatccctgtctcttgctggtcaaagttcactccatggagtgtccaacactcctgcacttctgaggccaagggtgtggggccaaggggagaggaggtgcagttgacttctgcctgggtgaagtcagttgtcacagcagctggacaaaacaagtggcaaggagctggaagactggtgtgtctaacggatcttaggcgatacatttaaaagtatctgatacaggcctggtgcagtggctcacgcctgcaatcccagcactttgagagactaaggcgggcagatcacaaggtcagtagatcaagaccagcctggctaacatggtgaaaccccgtctctactaaaaatataaaaaattagccaggcgtggtggtgcatgcctgtagtcccagctacttgggagggtgaggcaggagaatcacttgaaccagggaggcagaggttgcagcaagccgagatcgtgccattgcactccagcctgggcgacagagcaagactccgtctcaaaaaaaaaaaaaaaaatatcggatacagctataattgaaaagtagtgggaacctctactaaaagaaaagtcaaaaccaccaagatgcataataccaaaggaccttctcagctgaaagatttcttgatgctggccactgaaattgcagctcagagagctgagactagactcccttctgatgtgcagggcccatgttctcagataatcacaaacaagatcctgcaaatgtgtacccctcagctttactctatcctcctcccccaaatttccatgcaatttaaagagctaatgaagatggtgtttttaaagtgtcctggtgggatgggaaagagagggggctgataatcccaccggacagggagaattctcatcttgttcattcagaaaggcccagccccctgccaggttggactcccctcccctcaaggggcagcagcggactccagaaaaaaggcagatgtgtttgtatttaagagattggaggattaaatgagctagagaggctccctccacacggcctcatcctctgatggctggaagcccacctctgagtgttattaaatcgatgatgacatcatgggcactgcatgcccctccctctggagcccagcaggcttgcaaagcctgcagaggataagaaattggggtcagagcgggaagcctcaatccttcttctctggtgtataccgagatcgatgtgtagatcagattcaccagaattaaatctggggccccgtctgagtgctgtccttggctgacccttgggcacagtacttcagctcagggcctaggtttttctctgctacaaaacagagacaatcacctgttctccttacgacctggtgtgtgtggatcaaatgaaacaaggaaagctttaaagcaaatgtgttcttcaggggaccaggggcggaggggggggattgaggtgtggcctgtgggctgctagagcccaggatggggctgatggaaaatgactcccaggcaggcagtcctagcctcccacagccaagaaaggacatgcaggttctgaccaaaggggaaagaaataaatccaataaacatctcccaagaagaaagacaggaaagaaaatagaatggaaataggcatagctcagacccctcatggtctgggaagcagaccaaggatactgggcaggggaatggcacattgcatttgcatctgaggcacatcccttccaagaggcacatcccttctgcagcggcttgagggctgggtgagaggagacaggactggagacctgcacatgtcgtgtgcgcctggtgtagcacgggggtggtggggagaatgggagttggttgcagttgttctagttagcggcctgggctgctgacagtgaccgtggggaggagagagtttgtgacattgacagtggtgtggaaggtaacctttctgtggagggaaacctcaggtctcgagacgggctattgtaaataacttagtccaccagtgctgggctctctgctaagagtttcatatagtcatcacaactccaatgtagtagatgcaataggcatcttcttgttacagatgagtaaactgaagctgtgaggggttgagccatttgcccgcatcacagctagttcaaagtggtaccactaatgaagtcctggcaatctgccctgcaggctgttctcaggtttgacctttggttctgtttttcacttgaggatgctgtccccttaggttctgtctgtcttgtatgctccggtgactcacgagcctgtccactgggttcccaggtctcgcctcagcttcagaccaccggtccaacagccttcctgacccacctcaagcttaatgcgttcaaagatgaatctttatttacacgaaatctgctctagcccacttcccggggggtgcctccactatccacccaggggcagaatccggccactgcctgaactcttctcccctcaccccccacatccagagtcccagtcaccatacctctcacacgactctagatgtcaccaactcgctccttcccactgtcaccgccagcccctcactagaacatctgcaacccacgtgctgcaccacgcgggtgctacacgtgcaggtctccagtcctgcctcctctcctccacccgtaagaacaagggaaatcccacagaaccctctgccccggggagcatttaaatcagcttagtctatctccaggtcgctaccccgccccagcccaacacccaggcctcagtcaccctagacagagattcccgtacccaggcaggcaagggaccctaacacatcccagcccgctggtggtcacgcgcgcagcccggacaggccagcagcccccgccccgcgaggacgccacactcgcagcgcccggccctcccctagcggagcccgccccgtctccctccgccccgcctccctccgctccgctccgctccgctccgccccgccccgggtccgcagccccgcctgttcctcccgagggccgcgcgctctcgccggcccgccccgaaccgccccgcgctgggaatttgcggcggcctccgccggggcagccgagctgaaccggtctcttcctcggaaaggcagggccgaggggcctgcggggcagccatggaggcgacgcggaggcggcagcacctgggagcgacgggcggcccaggcgcgcagctgggcgcctccttcctgcaggccaggtgggcgcgcgccggggtgagagggcgggctaggcgcctgtgcgctggggcctcgggacccgccacgtgacgctcctagggctgccgggcgggaacctcgtgtgcggcgctggccggggcggagcggagcgcggggggcttggaggcgcgctaccgtggcggcggtgcccccgcgtttccttctctgtctggggagcctggggcccagcggggctcggcctccccgcttcgccgttgctcgggtgggaggagcgcccgcccgaagtttggggttttcctcccttcccgcgttccagcgacccgggctggcgccgggacagccgctgcgctgggagagctccccagggcggtgggtacacacacctcgtcactcggacccccaacttatccgcaagttccgggcgccacctccgcgttctcggggtccctccagccctgagtaggacttgattctgtcatttatcaggaggctgtctgcttgacctggggcacccaagaatgtgcgaatgtaatggaagagacagcggggaagggcggaagctgccgtccagagaatgaatgaggagcccttctcagtttttggtttatctcgttgggcgagcagagctccattctaccttcgtcccgttttactgaccagaaacattcactgcattcagcaggcattctttaagcgcctgtggtatgcccagcgctgtgccaggcagtaagggggtaggcagggtgaaggtgggagaggcttaccgtcctgtagggatcaggagagacagagcccaagtgggagtgagcggtcatcttggagggcttcatggaggaagtggcacttgagctgagtctcagaggacttggtaggggacccagggaagacaggctgttccatccagggaaacagtggggaagggcaaggagtttagtggtgctggagctttccggctgtaaaagaaagtgacaggaggatgcagactgattgtgaagggcctttaattgcagcaagtctaggactcgagttgaggacctagattgcaaaacttaggggtaggcgcactgccgtgaccgtgagtgccgcctcaaatgttgggccttggaggccttgcttgtctcaccctagttcctgtcctaggtgacaggttaaggacacagtctttatcccataggcactggggagtcgtgagaagtttctgagcactagcatgcgcaaagtccttgttaggaagtttttggtacgacctggatgaagggagaagtctgagcgcttgggctgaggtgagggatggctcgtttctgctgctgcggacatgcgggctgagcagctgcggactgtgtccgttttcacttagaaacaatgtactggccatagaccgcatactgtagctcacctgtctccctcggcctgtgagttaagtattattttactgatgaggaaataggcttagatgggctgaggagcctgactggctgagtccccgggctgtctgccccacgccgtgtccagtggtttcatctctgctgtgacccaacccatttaccagctcccctcttccaggcagcctcttctgcctgcgggatgtctctgttccgaatccttgccaagttgggggtcactgactgccctgaactgtgacagcccaatgggaacagcctgtgggtctcagatagggtcaccactttatctcctgtgtggggctcccatgtctagcatcttactcagtcttgacaatgagctgccagatgtcacttccaatgtacagatggggaaatggaggcccaaagaggttacatcatttgctggcaagaaccagggcctaaacccagggtttctgacttacgggctctgctcttacgactccactttggctgctaaggagtcatgtccctcttcccctgtgtgagctccccaccagccagggtattcccaggggggtggtgtgagggtgggagctctctgtctcccagggtgtctctgccccccacaatgtggcttcagcccattcccagtatcattgctgctcaagagagtaggcagaatcatcctgtccagttcctaggatgcttggatttcctctgctgcatccgtgctttgctcactacctcttaaggtaacccattccaacgtccacctgctttgttgccagtttttgtattataatgaaagtgttacaattaggccgggtgccatggctcacgcctgtaatcccagcactttgggaggccaaggtgggtggatcacttgagtccaggagttcgagaccagcctggccaacatggagaatccccgtctctactaaaaaatacaaaaattatccaggtgtgatggcccatgcctgtaatcccagctactcaggaggctgaggcaccaggatcccttgagcctgggaggcggaggttgtagtgagccgagatggcgccactgcactccagcctggatgacagtgagactgtctcaaaaaaaaaaaaaagtaaaaaaagaaaagaaaagaaagtattataattagtgcccgtgataaatcaaatagcaaaggcttcaagttttaaaaagtagtaatccctgtcccactcttccctagcaccagagacaatcaccctagcttcttttagctcttttttccagagtcaaattcctatttccaaataatatgtttataacaataaaaaacactatgtagcactttttatggatcaggccctgctcttaagtttttgcatgtattaattaaaccacgacccttgagatacgatctactggccaggtgtggtggctcatgcctgtaatcccagcactttgggaggccgagatgggcggatcaggaggtcaggagttcaagaccagcctgaccaacatggagaaaccctgtctctactaaaaatacaaaaattagccaggcatggtgtcatgcgcatgtagtcccagctactcgggaggctgaggcaggagaattacttgaactcaggaggcggaggttgcggtgggccaagatcgcgccattatactccagcctgggcaacaagagtgagactccgtctcaaaaaagaaaaaaaagggataggatctactattatctccattttacaaatgaggacattaaggcccaagaagttaagtgacttgctcaagatctggttagtggcagagctgggatatgaacccaaacagtctccaaagtccagactcttttttttttttttttttgagatggagtctcacactgttacccaggctggagtgcagtggcatgatctcagctcactgcaatctccgcctcccgggttcaagcgattctcctgcctcagcctcccaagtagctgggattacaggtgctcggcaccacgcccagctaattttttgtatttttagtagagacggcgtttcaccatgttggccaggctggtctcaaacttctgactttgtgattcacccgcctcagcctcccaaagtgctgggattacaggcctgagccaccgcgcccagccaagtccacactcttaaaaactacactcaactgctatttcttggtttattttattttattctttttttgagatggagtttcactcttgtcccctaggctagagtgcagtggtgccatcttggctcactgcaacctccacctccagagttcaagcaattctgcctcagcctcccgagtagctgggattacaggtgcccaccatcacgcccatctaatttttgtatttttagtagagatgacgtttcaccgtgttggccaggctggtctctaactcctgacctcaggtgatccacctgccttggcctcccaaagtactgggattacaggcatgagccactgcgcccagcctttgattccttttagaaaaaaggaaaaattttaaaaattagccatgtgtgacagcacatgcctttctgtggtcccagctactcaggaggctgagatgggaggattgcttgagcctgggaggtcaaggctgcaatgagccatgactgtgtcactgcactccagcctgggtgacagagcaagaccttgtctccaaaactaaaataaaaagatgatattagtcccctaccctaaactttagctttcctcaccccttcctacaatttctgtcctctgttttcatgttatcaaagtagactataattatctgctgctttaaaaccgtaattatcttccatgttttatctgtggattgactctaaacattgaaaattaatataaaatgtgtatgttatttaagccatgtatttaataaatattgttccaacagagccaaataatgtttaacagttacatttgctttcttatgttacttttgtttttcttggagtttctagttgcctttctttattctctcattatatttgccttcatttccttagttttttttctgttcaagcttttcattgtcttgtatgtcaccattctttaaatagaagcaaaattagtctctctgtggtccccatttgtgggttaccgcttgacttgttcaggatgaaaccccttccttttctgccaggcagccctgcagatgctgctgactgccttgaggattttaagtgtatggcatgcactcctcaactgtcgtggtgtcattgtccccatatggtagacttggaaagctgggaaggagagaagagtctaaccttgtttcaggttatctgccattgtgccatcaccattgttttcagcagcatttgctagtgattgagacctagctggcacaggctgggggctcagtgtgctaagtctgtggagccaggaacttgggacagggttgaggttgctcatcctcaggacatgagctgggggagaggatgcctttaccattccatgatctgcctcccgtgggcagagttccaggagaagaaaaccaggcaggtgctgattaatctttttttttttttttttttttgagacagagtctttttgtattgcccaggcagtgcagtggtgccatctcagctcactgcaacctctgcctgtgaggttcaagcaattctcatgcctcagcctccccagtagctgagattacaggtgtgcaccaccatgctgggctaatttttgtatttttagtagagacggagtttcgtcatgttggtcaggctggtcttgaatgcctggcctcatgtgatctgcccagctcaccctcccaaactgctgggattacaggcatgagccactgtgcccagtctaatcttgatttgcaagctggttgctgagtgtccactctgtgtgcctgctttttttttttttttttttttttttgcaataaggtcttactctgtcacccaggctaaagtgcagtggtacggtcatagctcactgcagccttgacctcccaggcttaagtgatcatcctgtttctgcctcctgagtagctggaactacagatgtgtgccaccatacccagttaatttttaatttttaatttttaattttttagagttgttttttgttgttgttgttgttgttgttgttttctttttgagacagtttcactcttactgcccaggctggagtgcaatggcgtgatcctggctcactgcaacctccgcctcccaggtttaagtgattgtcctgcctcagcctcccaagtagctgggattacaggcgcacaccaccaagcctggctaatttagtatttttatatagagacagggtttcactgtgttggccaggctggtctcgaactcctgacctcaggtgatctgtacacctcagcctcccaaaatgctgggagtacaggcatgagccactgggcccagcccccctctttttttttttttcctgtcctactaagttaggctggactaatgacagggattctcattgaccaaggtgcttcctgaggtggaggaggaggtagtcactgagcctctagtgtatgctgggtacacataacttccagatacacacatctaagtgttcatgcttccaaaatccctttattcctcgtaccgaacatcctactttttgccaagtttggaggtatcagagcaagaaactgaaggctgttacctctttcgccacccaagttctctgggcctggaggttatcactctctgctttttgaggccttaccctgatggctactgaggaaggagctgggtggggcctctgtgttggtcactcgtctcagaccactgagcagtcctcagggttactggctatctgtccagtctgaagatcgagccgcccgtcccttctctttctctggctccagtaagccaggcatctcagctccatgcagaaccttcttcacttccacctccaggcctttaccctgctttcctgcttttctgcctagttagattcatccatccgtgctttgaggctcccttccctcatgcaagctttgtgtattgccctaggccacgctgatccttttctttttttttttcagtatttattgatcattcttgggtgtttctcagagagggggatgtggcagggtcataggataatagtggagagaaggtcagcagataaacacgtgaacaaaggtctctggttttcctaggcagaggaccctgcagccttcctcagtgtttatgtccctgggtacttgagattagggagtggtgatgactcttaacgagcatgctgccttcaagcatctgtttaacaaagcacatcttgcaccacccttaatccatttaaccctgagtggacacagcacatgtttcagagagcacggggttgggggtaaggttatagactaacagcatcccaaggcagaagaatttttcttagtacagaacaaaatggagtctcctatgtctacttctttctacacagacacagtaacaatctgatctctctttcttttccccacatttcccccttttctttttgacaaaactgccatcgtcatcatggcccattctcaatggtcgctgtctcttcggagctgttgggtacacctcccagaccgggcggccgggcagaggcacttctcacttcccagacggggcggctgggcagaggcgctcctcacttcccagacggggcggccaggcagaggtgctccacacctcccagacggggcggccgggcagaggcgctcctcacctcccagacggggcggccgggcagaggcgctcctcacatcccagacgatgggcagccgggcagagacgctcctcacctcccagacggggcggccgggcagaggcgcttctcacctcccagacagacgatgggcagccaggcagaggcgctcctcacttcctagacggggtggcggccaggcagaggtgctcctcacttcccagatggggcggccaggcagaagggctcctaacctcccagacggggcggctgggcagaggtgctcctcacctcccagatggggcggccgggcagaggggctcctcacctcccagacggggcggccgggcagaagggctcctcacatcccagacggggcggccgggcagaggggctccttacttcccagacggggtggccgggcagaggcgctcctcacatcccagacgatgggcagccgggcagaggcgcttctcacctcccagacagggcagccgggcagaggggctcctcacttcccagacggggcagctgggcagaggcgctcctcacttcccagacggggcggccgggcagaggcgctcctcacatcccagacgatgggcagccaggcagaggcgctcctcacttcctagacggggcagctgggcagaggcgctcctcacttcccagacggggcggccgggcagaggcgctcctcacatcccagacgatgggcagctgggcagaggcgcttctcacctcccagatggggtggccgggcagaggggctcctcacatcccagacgatgggcggccaggcagagacgctcctcacttcctagatggggtggcggccgggcagagcctgtaatcttagcacttttggaggccaaggcaggcggctgggaggtggaggttgtagcgagccgagatcacgccactgcactccagcctgggcaacattgagcattgagtgagcgagactccgtctgcaatcccagcacctcgggaggccgaggcgggcagatcactcgaggtcaagagctggagaccagcctggtcaacacggcgaaaccccgtctccaccaaaaatacaaaaaccagtcaggtgtggcggcgtgtgcctgcgatcccaggcactcggcaggccgaggcaggagaatcacgggagcccgaggcagggaggttgcagggagctgagatcacggcagtacagtccagcctcagcaacagagggagaaggaagaagcgagggagagggggaggggtgggggaggggggagggagatccctttctaacctgatctcctgataagcctagtaatcaaaaacagaatagcaagctgttggccagacatggtggctcacagctgtaatcccagcactatggatggctgatgtgggttgattattgagcccaggaatttgaggccagcctgggcaacatagtgagacctcatctctacaaaaaataataataataataataataataaaataaaattagctgggcatagtggcatgcacctgtggtcccagttactcaggagactgaggtggaaggaatgcttgagcctgggaggccaaggctgcagtgagctgtgatcacaccactgtactccagcctaggtgaccctgtctccaaaaaacaaaacaaaaaaacagaatagcaagctattaagagcacaggtcttgaattaacataaacccaggtttgaattgtgtgtgttattcaggacgactgggttgcaagtgacagaaagccagtgtgaactgcaccatccttagcaaaaaggaatgtgttggctcatatggccagatcatgaactggcaacatgaacactgtcagcactttttctccccctttccctgatcctctctgcgaggctacttcattcttacctggatgtcccttgagggtggaaccttggctgtaggcagtcctgggcttgcacccttagaacccagcactataaaggaaggagctcttttcctcacctgcagttggaaaagtcccactgggccagtctagatcactggcccttcctgtggctaagaaaatatcatgtcttaccagaagaagcagtgggtgggaaataggctgacaaaaggaattgttgccacagctccttactacacgggtggctttggctaagcacctaatccctctaagcctcagtatcctcatctgtaaagcagatgcgtggattagatgagatagtgcaggtaaagacctagcattgcacatagttggtgttcagtgagggggtggaagataccgagtagaggggacaggaagacttagctgacctagggaaggcctacccaacctgtcttgcctgccactagaaaatgagatttctcccaagagcttgcctccctgtcctggggtactctaccagccagtatggatcatccttggaactggcaggaagggatctcagaaaattagggaagcaacagcagtatcgacagaagacagtctttgcagtgcctctaagctaatgtttgccactacaaaaggagtaactggtcgttgtgactgttttaatcagccagtagttgctgagcatggaccagggcctgagctcagaactctggaggaatacagatttgtggtccatggcgcctgttcttggcacaaacgagacgatgaaacccacacctcagtcctcttaggatgtggctggctgcttgtccctggaggtgtgcaagtaattgcagggactctgtaaagaggatttggactctgatagggaggtgggtgagttgggagaaccttaaaggtcacccctgttctcgagggtctagatgggagagtacagctccagccccattatgccagactgggttggcgttgaaatgctccctgcagtgggctggtggggctttgggaaaagcttcatcagggaagccttcccagaggaggcagcactggtcctggaacttcagtgcatctgtgaacagcagatgaccaactgtttagtgagagggacaggcctccaaagatgtatcgtgaggcagtactccacttcctgctgtgtctctcacatcaccttgcttctgctggctccttctcaggttctactgtggactgctgagaagaggattaccagcagcccaacctgacctcctcacagtgctggaatcaagcgagcaggaggccctatccatttcagtctctctaaagcacatttcattggagggctctgattggccaagctctggtcacatgcccatcccatagaccaatcctgatggacccaactatgggatggaggttaaaagtataagctcaggagcccaatcatttgggttcaaatccttagctgtgtgaccttgagcaagttattgagcctcttgggcctcagttttttcgtttctaaaatggaggtaatatttcagccttgaaaggtttctgtgaggattaaatgagataatacatgtaaacagctaacagtagtgcctgggatatagtaagtgctcaactaaggtcagctgccatgatccatcatcaagtttcatgcttttcagccacgattgcgtcctttgcctttcttgatttcctccatctttcagtagcggagaaaccccagcaattacacctgttcagctgtttccttcctgaatcagagagaagctaaggtcggggcagctgaagtccaccttctccttgaccacagggccagaccccagtatatccagcaaaaccctatccatagaactcaattatgtgtgtctcctcctgtcctcaagtccccagacctctttgtggctaatctcaggggaagattttggtggaggaggagagaagagctgacttctctcgtctggttccttcccaggcatggctctgtgagcgctgatgaggctgcccgcacggctcccttccacctcgacctctggttctacttcacactgcagaactgggttctggactttgggcgtcccattgccatggtgagtgtgaaatggtgcacagggctctgaccagcactgaggacacttagtgtggcttgaatttgccgagtgaccttagacaagtcacttctcctttatctcctagtaaactgagagaataggcctggatgccttcatatccttagctctatgacttggcccgtcaggcaactgccagcaagtggggggcctgaagagtcatactttgccccaactctcatgggggaactggtggtcctgaacagtcatactgtaatactgtaaccccctctggcctgtgtctggaagcaggtgaaccaggttgaaccaaatcaccaagacagacaaaggggtataggaaaggaagtggagcaccgcacccccacccccgtctcccctgtccttccccattaccttgggatagtattattttttctggagttgaagggcgtaggctgattttgcatattatatatgactgtgagccatgggtaatttttaatgccatccagtgaaaccatcccctgccttccaaggctacttcatgctttagtatccagtggtggcctccacagacaagattaatgctgggagggcaccagtgccccttgcttgtagtgggaggatggaagataggtaggtaggtaggtaggtaggtaggtaggtaggtaggtagataattgacagatgatagataataaatagacgaacgtgaagaaaattaagtgagatatcaccaggtatcaagtcattatttggtagtgggggcacagtgtgactattcatggcccccagacccctcccacccaacttgctgacagttgcctgacgggccacagtcatagagccaaaagatatgaaggcatccaggcctatactctcagtttactggaagataaacgggaagtgacttttcgaaggtcactcagcaaattcaagtgtaaaaataacaatatccagtgctgaaactggcactttgtacatactagtgatcatgcaaattagcaaagcccttttggggccgggcatggtggctcatgcctataatcctagcactttgggaagctgaaacaggaacatcacttgagcccaggagtttgagatcagtcagggcaatataatgagaccctgtctctataaaagatttgtaaattagctgggtgtggtgatgtgcacctgtagtcccagctactcaggactgagctgggaagatctcctgagcctgggaagttgaggctgcagtgagccgtgatcacaccgctgcactccagcctgggcaacacagtgagaccctgtctcaaaaaacaaaacaaacaaaaagcaaagcctttttggaaagcagtaataattcataagtaacaacttggcaagattagtacttagaatagtgcctaacacaataagtgtttaatgcatttttactgaatgaataataattatagcaaagttagaatagtggctaacatcgaatgtttactctgttctaagctctttatgtgtttcagtttatttaattctcatatcaacactattgctgatctcaatgttatagatgaggaaacttgaggagagagagaataagtaactggctcgaggtcaagcatagaggccagcatctgcccaggcattctggccctggagcccctttctgacaaggttgaattctctgtcacataaatatccagaatcctaatatattcatccctctgacccagtaatacccttccgagaatctgcccgtagggatataatcagcaagaagacagcagtttcctctaactcaaagatgttcattgcagtggtgtttatgatagccaaaccttagaagtgacttgcgtgtccagcattagggactgggtaaatcagttttgctatgtccattatagagaatgtttcctggcaattaagcagaaattatggatactatagagcaacctggaatatttaaggagaaaaaaggttcctaaatgacatgcagactgactaattgcaagtcaataacgagcttgtctacctgggatcaaagacttgataggtgtaaagaaaagctgtcctggcaatgctgtcagggagtgatggtgggtgctggttctccttcctgcagtctttttgaaggttgccttttaaatgtggaaaaataagaggaattgagccaagagttggggcatctggttgggtttgtgggtgacctagggcaagtcactgtcctgggcttcatttctctctccaagaagactggctggactggctgctctgaaccttcttctagcatgaaggaaccacatactgggggccaaagaagctgcccatcaaactggtgctagagagagagatgaggccaggagtgggctcgtggctcccctcactcactaggacccagcttctactggcataacagggtctcctattgggcaaatcacttcccccatcctgcttagagctgctgtgaccactgtaaccctaagtaggacttggtggaacgtagacatttgaaaagctcttgtatacgctagagattttcaaatgtatgcataatagttgcaaatttgttaaaaacaaaaacatttacaagttataaaagtaacatgtcatagatgtaacatagttgtaacataaagaagtgttagactctccctacccctttcctgtcccactgctgacagtttcgggaacacccctttcactcttctctgcttgtacaaacacatatatacatccttttcccttctaaccataatgggattttgctttatactttattttgcaacctgcttgttttcctttagaatatatcatatggtgggcatggtggcatgtaattccagcactttgggaggccaaggcaggaggattgcctgaggccagtcctggcaacatagcaagaccctgtttttacaaataatttaaaaattaatggtgcttggtgcctggcacctgtaatgccagcactttgggaggtcaaggtgggaggatcgcttgagcccaggagtttgtgaccagcctggtcaacataaggagacctcatctcaataaaaaagaaaaaagaaaaaaaaatatagctctctctccatgtcagtacatataaggtgtcatttctgttaatggctacttaaccttccatggtaagaagtactatcagggattcaactggtcctgtttgattgaagagtcagcctatttctgatgttttgctatcacagagtattttagcaagtatatatatgatgtaggtaaagaggcagataaacacatgcacactgagtaagagagagagagagagagactgagattgctgcattctgtgagttttatttctgcgggtttagtttatccaatatggcatttctgtgttaaaagagagaaccatctaaatccttccttgaaacttgtgggccttatgtgtgttttcaatcaacagatactagaagtacagtttgggggttgtgaaatgctttaaccccgcataggggttttcacactggcctggacaaggccagggctcagaagagagagcattgcagaaggaggaactgcccctggcctgccttcctctctctgggaaggaagagttgcagctactttgtagagcattcctgttttctcctttgtctcctaacgtgtactttgaacctggtttggaagcagtccctccacatcagggcctagcactcaggagactgatctggcactcaggagcgccagaacccgaacggtccaagtaggccctctgggccacctctcttgtgttatagatggggaaaccaaggcccagagaagggaagtattagcccagggtcacccagcaagttggtgccacaacggagtccctgagaagcctaccaactcccaagctggcatcagggtcatttatttggtatctgctgggtgaggggcacagggtcaggccttgcctggaattgcatctgctctgtgtctggggacaagtccgttacctcctctgggactcagctttcctgtctggataaacctttgtcccaaggctgccgagaaggtccagcgatcacaggaagaattaagtgtacatgatggggtggggggtgaaaggagttggggtgggcggcattaggggcagactcccttgaggcccgagggccgcgtggggctgtgcccaggtgagcccattcttccatttgctccgcagctggtattccctctcgagtggtttccactcaacaagcccagtgttggggactacttccacatggcctacaacgtcatcacgccctttctcttgctcaaggtactgtcccagggcccccactctctcctgtcatccccattctttgcacacctggcaggaaggtgatgctaagccctgtgtcctgactcaagcacgctcctgcctgctgctggggggtgaaggctgtgacagagcagcatgtccagggcctggggcccggggaaggcggagctgccggtggcctggagggatggaaaatatgccccaagaaagggcttttgatttgagcctcagcctggcgtgccagtgggggaagcagagaggtgttcaggtagaaggacctaaagacaaggctgtgcttgggaaaccgtaaaacatttggggaggctgaggcagaagtgactggaggtccagggagaggtcaaggacccactgggaagagaggaagaagccaggtggcaggagaggcagcagcagcagctgaactccatcctctgccctggagagccctgagatgtcactgggagcacgagcaggaactgctggctttgcactttgccaagtaaggcctttaaaactactataggttgagcatccctaatccaaaaatctgaaatctgaaatgctccaaaggagtctgaaattttttaagcactggcatgatactataagtagaaaactcggccaggcgcggtggctggagcctgtaatcccagcactttgggaggctgaggtgggtggatcacttgaggtcaggagcctggccaacatggtgaaacccccgtctccattaaaaatagaaaaaattggccaggcgcagtggctcatgcgtgtaatcccagcactttgggaggctgaggcgggcggatcacctgatgtcaggagttcgagaccagcctggccaacatggtgaaactccatctctactaaaaatacaaaaaaaagtagccgggcatgctggcaggcacctgtagtcccagctactcgggaggctgaggccagagaatcacttgaacccgggaggtagaggttgcagtgagccaagatcacgccattgcactccggcccgggcaagacagtgagacttcatctcaaaaaaaagaaaaagaaaaaaatacaaaaaacttagggccggcatggtggcttacgcctgtaagcccagcactctgggagcccaaggcaggcagatcacttgaggtcaggagttcgagaccagcctggccaacatggcaaaacctcatctccattaaaaatacaaaaaagttagccaggtgcggtggtgtgcgcctgcagtcccagctacttgggaggctgaggcaggagaatcacttgaatccaggaggtagaggttgcagtgagccgagattccaccaccgcactccagcctgggcgatggagcaacactctgtctcaaaaaagaaaattctacacatatgtacttaacacaaactttgtttcatgtacaaaattatttaaaatgttatataaaattaacttcaggctgtgtatgtaaagtatataggaaatataaatgaatttttccaggcatggtggctcacacctgtaatctcaatactttgggaggctgatacaggaggatcacttgaggccagtagtttgagaccagcctgggcaacatagtaagaccctatctctacaaaaaatttaaaaattagctgggcataatggtgcacacctgtagttccagctactctgggggctgaggtgggaggatctcttgagccactatactccagcctgagtgacagagtgagaccctgtctcaaagaaaaatgaaagaaatgaatttcatgtttagacttgcatatgcattcccaagatatctcattgtgtatatgcaaatattccaaaatctgaaatttgaaacatttcagataagggatgctcagcctgtatcaccatttactatcaccatcattttgtattgaagaaagatacttcaaatctccagaagtaggaggggtataatcccagaactccggtgtgttttcagttaaacagtggcatttcagaagcacctgcccccatccctgacattttcttcatgtttgctgggaccactcagaaatcagaaggtgccttcagcaggctgggccagccacccagggacacagccagggacagtgggagggctgggcctgagcctggactcctgcactgaaggctgggctgtcccctccagcctacagctcatgtgtgactttgggaaaggagttgggccctctggtctttttgctccctgggtaaagtcagcggggggtgctgctccacattccctccggggttcataggggtcacgggaggatctggaggctgggctggcctgctaaagggaccagccactttttggagtgacattccagctggaagcgtccatcccaccccaggtgtgaggggggaagcagagggtgtcacatactgtgacagaggtggggtcatgctgccaaccccactctgaaccccagctcatcgagcggtccccccgcaccctgccacgctccatcacgtacgtgagcatcatcatcttcatcatgggtgccagcatccacctggtgggtgactctgtcaaccaccgcctgctcttcagtggctaccagcaccacctgtctgtccgtgagaaccccatcatcaagaatctcaagccggagacgctggtgaggccacctcctgctccctgcctgtaagccctaggagcacagtctgtcctgggaggctgaagaaatggcccccacccctcgccgcacctgtcctttcaccaaaggcattctgctaggtgagggcactgtcgcctgccccaagctaggatgctcaagtgttcttaggaagtggtgcacagactgcctcccacctgggcccctgtaacagaaggcgaggccccgggtagggaataaggcagtgggggaggcctgggactgggagaagggtggtcagaggggatgcttggggccccagcacctccctggactgacatcgacatcccccgactctgccctgcccgttcctccctcagatcgactcctttgagctgctctactattatgatgagtacctgggtcactgcatgtggtgagtgatgggcccatctgtctatcccaggggccccaactaccggctagccctgtcactggctcagggacacactgagcaaggctgtctgggctgcgggtctccatgtgttgagtctcatcccctgtaaaggcactgtgagctcaacctccagtgaagttgtccccgaggttgcccgggagacccagctgctgtcccaggctccaggccccggcttccagccagcatccccccagcatcgccacccccgcccagccctcagtgcccgctgtggccagcagagggcagcgagtggctttggtccttcctcgccaagcctgagccctgagggtgggggaggaggacgcgtccctgataaacaacccccagatggtgatggcagggggtgggggcacagccagggacccccacccgtgtcgggcctgctctttgggagtggaggaagctgcggggagccagctggatcaggctggggaggggcgtgctgtttgcgctcccccctcttcagaactcccagaggggcaccttttcctacctaccccgtccctcagtcgggggagacctcagaaatgtggtctcagcctcaggagatcccgggcccaggctgggaggcttcatctgttccaccctcccatcttacccaggagaaactgaggccagagggaggagggctccgaaggctgcagctgggaggtgagggccagccctggacccggctcactcctgagttggtgctcacagcacacgcaccctgcacgggcatttccagggtgtttcgggccctgcgatgtcaatcctcctggctcagctggtccagggtccctggacaggcctcctgccatctttccctggcctttgccagagcctcttcccacagaaggttggggaagggtggaggggctaggaacagagagctggagccccagcaggaagggggtgtgggtgagaagaggcaggcgggtatactggtgaaagcacaggtgggagaaagggagctggtgtgtggagaggggagagggtagtattttggggtgaggtgtctgaggtgggggtggggctgtgtgctgagagtgggtgcagtgcttcaccaagaggcccctgcaggtgctgttctcttttttaacatgtggacctccatcctcagcccgggaggtgcctctgtctccaggctagtgtggtgctgggctgctggtgtctgcggtgcatgagacagacaaccccccagacaccccttacccccacggagtgagtgaggtgccctgggcggtgtggatgcctctgggcctctgactcacacgtgcgttgccttcctgtttctgtttctgtcccacctttgacgcccagcacaggcaaggttgggtggagaggagcgcctctcacccaggctaggcgttttgtaaactgtgacgtggcactccatgagaccccatgggagtggttgcagaggttgtggggaagagggccgctgagcaggcctctaagacactggccttcctgtcacaggtacatccccttcttcctcatcctcttcatgtacttcagcggctgctttactgcctctaaagctgagagcttgattccagggcctgccctgctcctggtggcacccagtggcctgtactactggtgagtggacatcagcatgggggcagaggcaggggcactgagagagccacggcagcaaaattctgcacttgccaatggacctgctgtgtggccccagggagactggccctctttgggcccgtgcttcttcttgtgtctagtggggactgtgacaatgccctgtggtggcctctttgtttccatgaagcccaggcctgggtgtggcagggaggtgggaggagagggcgaggttgcacagtctgtctccatcctcaagcccctctcactctgtgccccatctcaagaaccccagtgttgccctggggccggtacaatccacctccgacaccaagccctgtagtgggctgcggtttccacctctgtgaagtggggatgatggtacctgcctgtctgcctctcagatgatgaggatgctgaggacagagaggggctttgtcaaatgtaaagcactatggcgaggccagactggggggtttcatggcgtaggggcttctggccttgggtctttgttccctctggctctctcttcttcccattgcagaggacttaggcctcagccagtctcctagccctcgtctgtcacttctgccctggagacaggtcaccctgggattgtgggtatcatgggaaggacagggtcggggcaggactggacccttctctgatgggaggcctccctcaaaatgaaaagggcctcctttcctgggccagctctagatcctctccccggcctgtcccctatgtggctgagatggcccactggggctcatctgtatgctctctggggattaaaaagaatgggtggcagctacagtgagcgggaaagacgttaggggagcgcttcctgctggttcttaccccggcatcctgccgcgggggtggctgccgtcgtaatggcaattgtttgttgctttctcctctagtcagtttttgttgtgtggaagtataaacttaatgtgaccagagaagccagaaatatacatttgtaggtattctgttatttaaatattggcaacaaactcaacatttaaaaaacagtaactataccagctaaatcaatatgctgcccatgggctgtggcttagagcggcatagttctctgagccctggcaccagaggactcttctgcctgcctggagggcagcctggctctcgcacacaggaagggatgccaggcaggacggggttgccacggcagctgcctcactcacccctggcctttccaggtacctggtcaccgagggccagatcttcatcctcttcatcttcaccttcttcgccatgctggccctcgtcctgcaccagaagcgcaagcgcctcttcctggacagcaacggcctcttcctcttctcctccttcgcactgaccctcttgcttgtggcgctctgggtcgcctggctgtggaatgaccctgttctcaggaagaagtacccgggtgtcatctacgtccctgagccctgggctttctacacccttcacgtcagcagtcggcactgagtccctggcaccaggctctggcgctctgctgggtgggagggtgggccatggagggcatctgaatacaggagtagggggggtgtgggtgtgtaaccagagaccgagagcatgagtggggtgtgcctcgtgtgcgtggattcgtgtgtgtgtgtgtgtcttgtatatgtgtgcgcagagtgcatcattttcagactctactatttccgtcaagtttctgtttgatttggatcatctcaggatcggattctgttttagagtgtttctgggccaggatccgggcccctgccctcctctgcacctgaccacactccctactcagggctagtctgttcttcccggacatcttctggtagccgtgcaggagagggctgggtggggcagaggccaggaggggacctggtgtgtcacctgcccaccacctggctcatccctcaggcccaccctgaccctacattacataggttacgtcagcctactgtggctgttgagcaaagcatttctcctttctgggcctcatttgcactagatgggcctgtggtcccaaagtaggtcagtaggttggggttgctgacaccccttgggtgcagctttgggacagatgagtggctctgtcctgtcactgccctctccctgcctgggggctatgtgcactccagacccctgcccaggctcaggcccatgaggtatggagacaccctggcccccaggagctggaggcaccgcccactcccctggcattccagctttgcaggtgaccctcctctacccaaagctctgtccccctgctcccactccagaagaactgcggcacgtgcttcgggcagcctagccacaggctttgagcgcctgcattcctgggggctggagggtggggtgccaaaggccctgagcaaaagccagagctcctctcatcaaagcctttacaaggtgctgggcccagaggctttgccttgacagagtggcccagggtttcaagggaggaggaacctccccctacctaggacccttcctgtggggggtctacagagtcagggacagaagggaagggacccacaggaagtcacagtggtgcccagggatgtgtcagcccccagccacggggacgcgggattcaagaatgaagtaaatacagtcacagccccaagtggtgttagaggtgttttttgtcttttctccctttcgtgctgaggtgtagcacacacggtgcgccctacagcatggtgagttgctgtatcgtgaaccctcacgcagccattgccccacgctggtgttttccatctgtgcgtcacccccggagacacctacacacataaggagggagttggccggggcaccccagcacacactggcctaactccaaggaggcacctcatctcttctggagccccttcccacaggcaaggggattcagagggagcatgttggcctggccgccttcaggcttccagagtcccaagtgactttccttgatgtccttctctccatcctctgcacagaggcagccttccctcctcttatccctgccatggggtttgggagggggagcctcaaactctgacagggaggagtcggagtccccagctaaaattctctgggtctagaaacaggtgtaaagcgattctggggatgtgatttgggagaaaagcacactttccacacagaggcggtcaggaaaggagcggggaggggagagtggggcacaggcagcgcctcccgtctatgcgcctgtgtgcaaagtggcacaatgccccccttcctattggcagtgcagcccctggccagcaaccactcgcacctgggctgggggcctttgtgtagggcacacctgtgcagccacacctacttgtagagcctcatagactcagctgtggacaaaagcctcacgccccaaacagggaaatgggatctcaaggggaagaagctggggaggcctcacaccctgcccccatttcctcctatgtgggggaggggagcagcacgaactcctgaagacttgggagcgtcagcagcttctgcggaaggggtggggctgagggtggagagaggaagggaaggaagaaaaggggagccttcctggccagggtaaccggcactaagaggcctcactccaagcccccgaggagcctgtggtggggctggagacccggctcaggcccctccaccacccttaaagtcctcagaaggtgggaactgaactggcacaggctgggaaccggctgtgcgctggccacttgattttgccagctgccctgtaattcagctggtgaggaaactgaggcacagactgaggtagaatgattcgccagtcactcagcaagtcagcagacggggaggactgaatcccagcctgagagcaccgaagcttgtatccctgcaataccgagccccaagcctgcgagccccggtgcccatctctgagttgggccgtcttggaagggttcccttcctcctacaagatggtgtgtgaggagccttcaatacgacccggggtgtaaagtgtccaactctagtaggggcctgatggcatccccgccgagtcccaggagagagagagaagaccccttcctggagtccagggctcccgggaagaaacactggcatttgtccctttgcttcggcttctggaggcagagactctgagcccagggagagccttctgcagccccatttcctcaaaaatccaacctgcccaggtggcgggtcatgagctgtgctcaggaagctggaatctgaccctggtggcgtcgggcccagtctccatggcagccgagcatttattacccgggcctccacccagcttggcagactttagacttgaggctggaggaaagggaactgaacgcggttctgggagcagcaagcccacgggtagcagccgaggccccagaatggtgagtgtgagggtctgtgtcggcctggccagggctgggggcgtgaacctcaggtggagccctcccctgactgttttcctttctctgctgcaggccaagtttctttcccaagaccaaattaatggtaggttgggtttgttctttgattagcaactcagcaaaatatgggtctcattaggcaatttgctctgctcatgttttcttggtgggaaggaaggtggctgtgggagagctgggcccacccagggccaagagctgcggggaggctgctgttggcggggtgggggttgggggtaagcctccaaaatagacatgtggctttatacttgtcagtgtgacttacaagccagggcgctaagacagaacttactaggtttccctccagaacctgaccagttggatttggggactgaggggactggggatggagagagagaccattaaaggtatggctggcagcagggaaagaggaggggctttgtaattgagacagaacagaggccaggtctgcactctctggcaggatgcgtctactctctgcgcctcagtctccctatctgtaaaatggagggtccactgagccccctttgccctggcatcaagcctggtttgggcgtgagcactttattccctgggtcccctactctgccagccctcgaccaggcttcagtttcacaccgtgcagggttctatttccagaaggccaagagcaaagagttgcgttacaaagaacttgggggcccagacctgagccaggggagcctcatggctgcagcccccctgcacctggcaggagaggcccaggaggcacagccagctgctgcttgaggttgtgaccctgaaacctgtcccaacagtggacgtcaatgggcctgagagtcccccgaggcatcccattcctccaggtctttgctgaaacatcgccttctcagtgagtccttcgctgaccactggagataaaattacaggcaccttgggcccttgtgatccagggtagggtcctgagagcccagccaagtggggttagggttacctgggcaggagttccagagttctgggtattctgagcttggtccagaggggcaggaattgtgagctccaggtgggcacctccacgtagaaccctggaactctttatcccaagaggagggccagggcaggagcagggacttttaaaacacagggcccggggcagtgccctcttgtccaggtctaacggtgataatgaatggtggactgagggctggagtccagccttcagcctcagcatcctcccacccatgcctggttttgaggctcactgaccctccctcctgggatagccaaagctcccagaagggaagaaggtaaattgtctttgtatcccagtatctgacaccaagaaagtggccaccagtgtttaatgagtgtgtgaaagactggatggggtggcctagcgaagtgggaagaacaggggctttggaggcagcagacctgaagcctaatcacccttgagcctcggttttctcacctatgaagtaggatatgccaccttaccaggctgctgcgagccacggacagaggggaataatgtcagttacatgctggacgctgggccaggcatagccaggtgtcacccacatgtgggctggggctggctcactacagctagcaagagccatagttttaggaattttgcaagcaggatgttaaagccagccattattaaataatgtaggatcaaacagtgtgtcaatccctacatctatctgtacaaaaagttaaaaagacagccctattgtgatcagtggagatggagatttgaaagaagtttcaatttaatgaatgtatttggtaaaagggtgagaaatagtttaacagtagatcacatcaggtttaatgaccattcattcattggaaaaagaatcgcactcattggcgcgcagcttcatttgtcaaatcatggttgaatcgaaactataggttggcaatggatataagagttggcaaaacttgggccgagtgcagtggctcacgtctgtaatcccagcactttgggaggccgaggcatgtggatcacctgatgtcaggggtttgaaaccagcctggccaacatggtgaaaccccatctctactaaaaatacaaaactggccaggtgcagtggctcatgcctgtaatcccagcactttgagagaccgagggaggcagatcacctgaggtcaggagtttgagaccagcctggccaacatggtgaaaccctatctctactaaaagtacaaaaattagcctggtgtgctggcaggcacctgtaattccagctactcaggaggctgaggcaggagaatcacttgaacccaggaggcggaggttgcagtgaaccgagattgagccactacactccagcctgggcaacaagagcgagactctgtctcaaaaaaaaaaaaaaaaaaaaaaaagccggtcatggtggcacatgcctataatcccagcttcttgggaggctgaggcaggagaatcacttgaacctgggaggtggaggctgcagtgagctgaaattgtgccattgcactctagcctgggcaacaagagcaaaactctctcaaaaaaaaaaaaaaaaaaagttggcaaaactcatttgtggtaatcaagtggctagatggaatttatttatttgagacagagtcttgctctgtgcaatggcatgatctccgctcatttcaaccttcaccacccagactcaagggattctcccacctctgtctcctgagtagctgggactacaggcatgcaccaccacacacaaaacatttgtaaatattttgtagacatgaggtcttactatattgtccaggctggtctcgaactcctgggcccaagcgatactcctgtctcaccctcccaaagtgctgggattacaggcgtgagccactgcacccagccctagatggaatttataataaagaatagtgtacatttctgtattatttgtaaattgtgtgctacacatcctttatgtttgtacagtgcagaggacacaagtacatttatgatcagagctggtggttaaacatccagcacagctggtgttatcctaggccttgcacaggtctctttcttgtcctgggggatttgcattttcaaagagaagacttaaaggggatttttaatccaattcatttaacccaattaatcctttcattcaacaaatgtttgtgtcccttctttgtgcctggagctacatacaacagtgaactcaaagacaaaaatcccttcctcacagggggtcaccatcgagggaggggaacgtggtgaaatatatgtgctagtatgttagagggccgacctgtcaggagaaaaagcaggaaggagagccaggaggtgaggagggagagtgaagagatggtggaggaaggggccagcaggaagcccagctgggtctccagcaccctgttgtcttgttccagtgcaggaatgcaaagttcagatgtggccttccaggtctttaaaggcgtctgaggcagggagacagcacgtatctgatgtgaaggtttgtgaggaggtgggcctctatttgagccctggccctgctgctggcaaggaccacaggcccccagtgactgacagggcttgtcggggagtagtgaagtgcccccatctgcagatccaggctgattctggaccccaagggtgtgatgagcaccttccagcacaggtcaggcagggagagcagtgggccttgggcccaccctcacccaagggcaaacccagacagaaagacaaggtgagggtggccatgagaggtccccaggggtaccccctgtagtgctaaggttaagctctgtgattggggcagtcctctctctgtccccctgacgtgaggtgatggcattgtcccctctggcactgggccctcttgcaggcaattgggttttatgggaactaaacctggggtcttaggccaggctctggccctgcttcccctgggcctttttggcccctgccacctggtcctgactttggtttgccccttcggaagctcaggctctggaatgttctgaaagggcagttgtgcggggctggggctttcctctcagtctctccacaaaggccgcgaatttgtctctaaatggtacatggcgatctgcctgtctttagtgacccccctgaaatcctaccagggaggcctgagtgccttcattagggaatatgaagggacccctggtctgggctggggatttggggggctccttctgcatcctctccctcaccctactgctctcagtggtgtctgccctggaaccgaaggcagtgtggcctggtgggcagagctgcccacagccaggctctcagtgttccagccctcaatgtcctgtccgcacatgggaatatgagggggcgcatcacagggttgtggggatgaagcgagggcctgggggtggagtgctcagcaacgtgaattgtcattgttgctgtcatcagctaaggggctattattgtccaggcctctaaggacctacctgggtggtgtgagaagcaggagagagaacagagccctgagccccagcctgggagggccagcgccaggccactgtgtttccacggctccacccacaggcccgggtgcctcgtctgggctggacgagaatctccctgtcctgatggcagccccacctacccctaaatcagatgctcagtcagtgcggttcagggacttttcctgaactcccagctggccttcctgggcctcccagggccgggagcccgtgggatggctgtgtcaggccgggagtctgtgggtttaggggagctagctccggctgccttccacctccaccaagtaccgaaggagaaagggcttcagaccctgggagaatttcccagcaggaccctttgaagtctctaagaacaggaccagggcccgagtccaaggacagcttgagggtttagcagcctggaggccagggcaggggcaataggctcagaaatgccccagctctgatgatgatgataatatcatcatatgaaggccactctctggcaggcctcctgggatttctggctctcacagtaatcctgaggccttattattcccattgtccagaaaagttgtgtttgcagaggtcccctgggggtctggacgccttgctgtgggttcctgctctcccctgtgggccctggaggggcactgtcctgggagttccagtcctgtgggttggcggggagggggagggagaaggaagggagggagtagggagaaagggaaggggagccagataaaatacaggacacccagttaaattagaatttcagacaaacaacaaatacttttccaatagaagtatatgtcctatgcaaaatttggggcatacaataaaagtatattcagtgtttatctgaattcggtttaacttggcagtcctgtattttcatttgctgtatctagcacccttgggaggggagagagggatggagggagtaggcaaaaggaaggggaaaagagggagaagagactaaggatggggagggcggcatgggcggagagtgaccagacgctgctgaccctccctctgggccgtgtgcagagtacaaggaatgcttctccctgtatgacaagcagcagagggggaagataaaagccaccgacctcatggtggccatgaggtgcctgggggccagcccgacgccaggggaggtgcagcggcacctgcagacccacgggataggtgagtggtggtgggaacaacggggagaggggaggggcccagcaggtgggtgcagacagtagaggtgtgaaaagctcagcagtttgaggggcaggtggcagggaggcctcctggggatccagctgtggcagccccagaccaggagtgccgtacctcacttgggcttcctggaatcctcatagcaaccagtgataccccatctcacagacctcgggatctaggcgttccaacagacttaccaaacccagagaaaaatcgcgctgacagcgatcccatgttgctttataggaacatttccctttgttgagtatttgtcatgtgcttagctccaaaaaccctatgaagtaggcattctcctaaccttttttttttgaggggggacagagtcttgctctgtcaccgagaagctgacgtgcagtggtgagatctcggctcactgcaacctctgcctcccaggttcaagtgattctcctgcctcagcctcccaagtagctgggattacaggtgcctgccaccacgcctagctaatttttgcatttttagtagagatggggttttgccatgttggccaggctggtcttgaactcctgacctcaggtgatctgcctgcctcggcctcccaaagtgctggggttagaggcctgagccactgcgcccagctttctcctaactccattttacaagcaaagatcaaggtttacatccattaagttcttgagccaatgatggcatcaggattagtacccaattcttctgatatcaaagactgacctaaaaactatgcaatagtttttagaaaaactattgctagaaaaaaaatgctgaaagaaaacccatccaagatgttaccaagtggttctctctggtaatgggattatgggtgatttttgttccttttattgtttcctgtattttcaacaatgagaacacatacagcttttcataatcagaaacaagttttatgttttgttttgctttttctaagaaaaaaagtagtttcagagcctggggttgctgtttgcattgggggctggacactcaggaaggagggactggcgcaggggaagggcatccgctgggaatagcacttgacccggagcccataggctgctgctcagtctcaggtcaccagcttcctcatctcaggggggtcaccaccatctgctagggttaccagaggccccactagaggatgcctgcagttgcgctgggagcccaccctggggcaggccacgctgggcccaggtgggcctctgaaagcctgcagcctggcggtgggttgctcagtggtctgatacctgagatcccccatgtccagctccaaaggggtggtggtttccttgatttctgtcccctccaaacaggaagttgtagtccagggaagttttgatttcctgcagttacatcccagccagggcccgtggaggaggggctgggatggagactgcagtgaggggaaggcaggtgagcagcccagcctgcgactgaggcttgagaccccaggtgggggtgctgatccatcctggtaagatgtactgtggtggctgtcaaaggtggaatgcacacatggacctgtttccctccagttcagggcaggagggaagcgctagaagggagcagaggagcccagtcctccatctgtggttgggaacccactttcttgagctttggggtgatgataagcatcgtcactgaggacgttgctgaaatgaagaatgtccagtccagtgaggggcctgtcgtgggaactcggtgggaggggatgcatcctcttcactgtgaccactgccacatcctggcattccctggtcagttgaccttgaaccggctgtgcaggtccagcaggaggccagctggcttcctaggagtctttttccctctgctcactctgctgtgtttgcgggtttcctagacggaaatggagagctggatttctccacttttctgaccattatgcacatgcaaataaaacaagaagacccaaagaaagaaattcttctagccatgttgatggtggacaaggagaagaaaggttacgtcatggcgtccgacctgcggtcaaaactcacgagtctgggggagaagctcacccacaaggaaggtaacagcctgggtcctgtctcccaacagttggagggggttagggagttggaaggagggcaccaaagcctagctgatgccaccagggtggtacagaccacctctgttgatgcgcgcgcaggagactgtgagcagatgccacactaggtgggtgctggactggagcctggggaagaactagaggggctggaagggcgcagggaggtctgccagggtgaagggacagcctaggggaaacccagctcggaacccacaaggcagggcagctggagcgtgcagtctggtctccccctgtgttcaagctctcactgtggggcttcatctagtgcatgacacccctgggagcacaaatgcctgctcctactgataaagaagcagggggagtgagcggctcccaagcagcggcgcaggagcgaaggcaggtctagacatccctgccctttttcccat

SEQ ID NO: 2272 - DNA, 2189 bp, Homo sapiens
ccgggtccgcagccccgcctgttcctcccgagggccgcgcgctctcgccggcccgccccgaaccgccccgcgctgggaatttgcggcggcctccgccggggcagccgagctgaaccggtctcttcctcggaaaggcagggccgaggggcctgcggggcagccatggaggcgacgcggaggcggcagcacctgggagcgacgggcggcccaggcgcgcagctgggcgcctccttcctgcaggccaggcatggctctgtgagcgctgatgaggctgcccgcacggctcccttccacctcgacctctggttctacttcacactgcagaactgggttctggactttgggcgtcccattgccatgctggtattccctctcgagtggtttccactcaacaagcccagtgttggggactacttccacatggcctacaacgtcatcacgccctttctcttgctcaagctcatcgagcggtccccccgcaccctgccacgctccatcacgtacgtgagcatcatcatcttcatcatgggtgccagcatccacctggtgggtgactctgtcaaccaccgcctgctcttcagtggctaccagcaccacctgtctgtccgtgagaaccccatcatcaagaatctcaagccggagacgctgatcgactcctttgagctgctctactattatgatgagtacctgggtcactgcatgtggtacatccccttcttcctcatcctcttcatgtacttcagcggctgctttactgcctctaaagctgagagcttgattccagggcctgccctgctcctggtggcacccagtggcctgtactactggtacctggtcaccgagggccagatcttcatcctcttcatcttcaccttcttcgccatgctggccctcgtcctgcaccagaagcgcaagcgcctcttcctggacagcaacggcctcttcctcttctcctccttcgcactgaccctcttgcttgtggcgctctgggtcgcctggctgtggaatgaccctgttctcaggaagaagtacccgggtgtcatctacgtccctgagccctgggctttctacacccttcacgtcagcagtcggcactgagtccctggcaccaggctctggcgctctgctgggtgggagggtgggccatggagggcatctgaatacaggagtagggggggtgtgggtgtgtaaccagagaccgagagcatgagtggggtgtgcctcgtgtgcgtggattcgtgtgtgtgtgtgtgtcttgtatatgtgtgcgcagagtgcatcattttcagacttgttttagagtgtttctgggccaggatccgggcccctgccctcctctgcacctgaccacactccctactcagggctagtctgttcttcccggacatcttctggtagccgtgcaggagagggctgggtggggcagaggccaggaggggacctggtgtgtcacctgcccaccacctggctcatccctcaggcccaccctgaccctacattacataggttacgtcagcctactgtggctgttgagcaaagcatttctcctttctgggcctcatttgcactagatgggcctgtggtcccaaagtaggtcagtaggttggggttgctgacaccccttgggtgcagctttgggacagatgagtggctctgtcctgtcactgccctctccctgcctgggggctatgtgcactccagacccctgcccaggctcaggcccatgaggtatggagacaccctggcccccaggagctggaggcaccgcccactcccctggcattccagctttgcaggtgaccctcctctacccaaagctctgtccccctgctcccactccagaagaactgcggcacgtgcttcgggcagcctagccacaggctttgagcgcctgcattcctgggggctggagggtggggtgccaaaggccctgagcaaaagccagagctcctctcatcaaagcctttacaaggtgctgggcccagaggctttgccttgacagagtggcccagggtttcaagggaggaggaacctccccctacctaggacccttcctgtggggggtctacagagtcagggacagaagggaagggacccacaggaagtcacagtggtgcccagggatgtgtcagcccccagccacggggacgcgggattcaagaatgaagtaaatacagtcacagccccaa

SEQ ID NO: 2273 - protein, 307 aa, Homo sapiens
MEATRRRQHLGATGGPGAQLGASFLQARHGSVSADEAARTAPFHLDLWFYFTLQNWVLDFGRPIAMLVFPLEWFPLNKPSVGDYFHMAYNVITPFLLLKLIERSPRTLPRSITYVSIIIFIMGASIHLVGDSVNHRLLFSGYQHHLSVRENPIIKNLKPETLIDSFELLYYYDEYLGHCMWYIPFFLILFMYFSGCFTASKAESLIPGPALLLVAPSGYWYLVTEGQIFILFIFTFFAMLALVLHQKRKRLFLDSNGLFLFSSFALTLLLVWVAWLWNDPVLRKKYPGVIYVPEPWAFYTLHVSSRH

SEQ ID NO: 2274 - DNA, 2242 bp, Homo sapiens
ccgggtccgcagccccgcctgttcctcccgagggccgcgcgctctcgccggcccgccccgaaccgccccgcgctgggaatttgcggcggcctccgccggggcagccgagctgaaccggtctcttcctcggaaaggcagggccgaggggcctgcggggcagccatggaggcgacgcggaggcggcagcacctgggagcgacgggcggcccaggcgcgcagctgggcgcctccttcctgcaggccaggcatggctctgtgagcgctgatgaggctgcccgcacggctcccttccacctcgacctctggttctacttcacactgcagaactgggttctggactttgggcgtcccattgccatgctggtattccctctcgagtggtttccactcaacaagcccagtgttggggactacttccacatggcctacaacgtcatcacgccctttctcttgctcaagctcatcgagcggtccccccgcaccctgccacgctccatcacgtacgtgagcatcatcatcttcatcatgggtgccagcatccacctggtgggtgactctgtcaaccaccgcctgctcttcagtggctaccagcaccacctgtctgtccgtgagaaccccatcatcaagaatctcaagccggagacgctgatcgactcctttgagctgctctactattatgatgagtacctgggtcactgcatgtggtacatccccttcttcctcatcctcttcatgtacttcagcggctgctttactgcctctaaagctgagagcttgattccagggcctgccctgctcctggtggcacccagtggcctgtactactggtacctggtcaccgagggccagatcttcatcctcttcatcttcaccttcttcgccatgctggccctcgtcctgcaccagaagcgcaagcgcctcttcctggacagcaacggcctcttcctcttctcctccttcgcactgaccctcttgcttgtggcgctctgggtcgcctggctgtggaatgaccctgttctcaggaagaagtacccgggtgtcatctacgtccctgagccctgggctttctacacccttcacgtcagcagtcggcactgagtccctggcaccaggctctggcgctctgctgggtgggagggtgggccatggagggcatctgaatacaggagtagggggggtgtgggtgtgtaaccagagaccgagagcatgagtggggtgtgcctcgtgtgcgtggattcgtgtgtgtgtgtgtgtcttgtatatgtgtgcgcagagtgcatcattttcagactctactatttccgtcaagtttctgtttgatttggatcatctcaggatcggattctgttttagagtgtttctgggccaggatccgggcccctgccctcctctgcacctgaccacactccctactcagggctagtctgttcttcccggacatcttctggtagccgtgcaggagagggctgggtggggcagaggccaggaggggacctggtgtgtcacctgcccaccacctggctcatccctcaggcccaccctgaccctacattacataggttacgtcagcctactgtggctgttgagcaaagcatttctcctttctgggcctcatttgcactagatgggcctgtggtcccaaagtaggtcagtaggttggggttgctgacaccccttgggtgcagctttgggacagatgagtggctctgtcctgtcactgccctctccctgcctgggggctatgtgcactccagacccctgcccaggctcaggcccatgaggtatggagacaccctggcccccaggagctggaggcaccgcccactcccctggcattccagctttgcaggtgaccctcctctacccaaagctctgtccccctgctcccactccagaagaactgcggcacgtgcttcgggcagcctagccacaggctttgagcgcctgcattcctgggggctggagggtggggtgccaaaggccctgagcaaaagccagagctcctctcatcaaagcctttacaaggtgctgggcccagaggctttgccttgacagagtggcccagggtttcaagggaggaggaacctccccctacctaggacccttcctgtggggggtctacagagtcagggacagaagggaagggacccacaggaagtcacagtggtgcccagggatgtgtcagcccccagccacggggacgcgggattcaagaatgaagtaaatacagtcacagccccaa

SEQ ID NO: 2275 - protein, 307 aa, Homo sapiens; identical to SEQ ID NO: 2273

SEQ ID NO: 2276 - DNA, 2053 bp, Homo sapiens
ccgggtccgcagccccgcctgttcctcccgagggccgcgcgctctcgccggcccgccccgaaccgccccgcgctgggaatttgcggcggcctccgccggggcagccgagctgaaccggtctcttcctcggaaaggcagggccgaggggcctgcggggcagccatggaggcgacgcggaggcggcagcacctgggagcgacgggcggcccaggcgcgcagctgggcgcctccttcctgcaggccaggcatggctctgtgagcgctgatgaggctgcccgcacggctcccttccacctcgacctctggttctacttcacactgcagaactgggttctggactttgggcgtcccattgccatgctggtattccctctcgagtggtttccactcaacaagcccagtgttggggactacttccacatggcctacaacgtcatcacgccctttctcttgctcaagatcgactcctttgagctgctctactattatgatgagtacctgggtcactgcatgtggtacatccccttcttcctcatcctcttcatgtacttcagcggctgctttactgcctctaaagctgagagcttgattccagggcctgccctgctcctggtggcacccagtggcctgtactactggtacctggtcaccgagggccagatcttcatcctcttcatcttcaccttcttcgccatgctggccctcgtcctgcaccagaagcgcaagcgcctcttcctggacagcaacggcctcttcctcttctcctccttcgcactgaccctcttgcttgtggcgctctgggtcgcctggctgtggaatgaccctgttctcaggaagaagtacccgggtgtcatctacgtccctgagccctgggctttctacacccttcacgtcagcagtcggcactgagtccctggcaccaggctctggcgctctgctgggtgggagggtgggccatggagggcatctgaatacaggagtagggggggtgtgggtgtgtaaccagagaccgagagcatgagtggggtgtgcctcgtgtgcgtggattcgtgtgtgtgtgtgtgtcttgtatatgtgtgcgcagagtgcatcattttcagactctactatttccgtcaagtttctgtttgatttggatcatctcaggatcggattctgttttagagtgtttctgggccaggatccgggcccctgccctcctctgcacctgaccacactccctactcagggctagtctgttcttcccggacatcttctggtagccgtgcaggagagggctgggtggggcagaggccaggaggggacctggtgtgtcacctgcccaccacctggctcatccctcaggcccaccctgaccctacattacataggttacgtcagcctactgtggctgttgagcaaagcatttctcctttctgggcctcatttgcactagatgggcctgtggtcccaaagtaggtcagtaggttggggttgctgacaccccttgggtgcagctttgggacagatgagtggctctgtcctgtcactgccctctccctgcctgggggctatgtgcactccagacccctgcccaggctcaggcccatgaggtatggagacaccctggcccccaggagctggaggcaccgcccactcccctggcattccagctttgcaggtgaccctcctctacccaaagctctgtccccctgctcccactccagaagaactgcggcacgtgcttcgggcagcctagccacaggctttgagcgcctgcattcctgggggctggagggtggggtgccaaaggccctgagcaaaagccagagctcctctcatcaaagcctttacaaggtgctgggcccagaggctttgccttgacagagtggcccagggtttcaagggaggaggaacctccccctacctaggacccttcctgtggggggtctacagagtcagggacagaagggaagggacccacaggaagtcacagtggtgcccagggatgtgtcagcccccagccacggggacgcgggattcaagaatgaagtaaatacagtcacagccccaa

SEQ ID NO: 2277 - protein, 244 aa, Homo sapiens
MEATRRRQHLGATGGPGAQLGASFLQARHGSVSADEAARTAPFHLDLWFYFTLQNWVLDFGRPIAMLVFPLEWFPLNKPSVGDYFHMAYNVITPFLLLKIDSFELLYYYDEYLGHCMWYIPFFLILFMYFSGCFTASKAESLIPGPALLLVAPSGYWYLVTEGQIFILFIFTFFAMLALVLHQKRKRLFLDSNGLFLFSSFALTLLLVWVAWLWNDPVLRKKYPGVIYVPEPWAFYTLHVSSRH

SEQ ID NO: 2278 - DNA, 118549 bp, Mus musculus
  misc_feature (1)...(118549): n = A, C, G or T/U
cacccctaaacatgcatgaacctatgggggtcattctcgttcaaactatcacccccccaatacataattttaaaatgtgtttcattaattcagaaattcatacctgtttacctcccccagttctccctctaactcctcccaggtctacccctgaaccccagatctcttccaacttcaagttctctcactctttcttttttttttttttaaaaaaaataaactttggagtccagtttgtgtgcctatacactcttggatgtgaggtcacccactgaaggatgatcaatctatcagggccacacccctgaaagaaaaccagctctcccttcccctatcagctgtccactgtcagtagctcctcagctggggttggggctcatgaacccttctgccaggctggagtgtggattgatttcatcttatgtaggtcttatgcttggcgttcaagagtactgtgtccctatcgtacttcactcaggccttcccaaatctctggctattacaatttttctgtctcttcttccatggtgatccctgagtctcaggagatgtgggatctaattgctttatagcatctttcattgtataaaacttaaaatttgtagactggggaattggctcagtagctaatggtgcttatcagttgtggtttggataagaatggctcccatagtctcatatatttgaatgcttagtcaccagcaagtggccctatttgaaagaattgaaaggactcagaggtatggacttgatggaggaagtgtgtcactgtaggtaggctttgaggtttcaaaagtccatgccaagccccagagccatctcccaccccaccccgtactcccgctctctgcccatggatcaggacgtgggtctcagctgctgctccagcatctgtctgaatgccaccatgattcctgccatgatgataatgaactaaagcactgaaactgtatgaaagttccaattaaatgcttcctcttatgtagtggctgttcctggttgtcaacttgactatatctagaatgaactacaatccataattggtaggctcaccagtgatcctaatctggaggctgggagatagaagtttctgacctgcatcttggtctggagatcttgaggcacagtagctgtgaattccagaagattaagacagggagatctgggattaaaggtgtggtggtacacctttaatctgggctatgccttctgctggagacctacataaggacattggaagaaggaagtctgtatctcctttgcctgcttgctgtgtgggactgagcagctgctagatccttggacttctattcacagctgctactgaccattgttgggagttgaactgcagtccaactatacagtcctttactatatagagactacccataagttctgtgactctagagaaccctgactaatacagaagttggtaccaggagtggggtattgctgtgataggcctgaccatgcttttatttgaaagaatgtagatttggggactttgggtttggaatgcagtggaatgctttaaatgggggcttaatgggtcatcctagtaggaatatggaagactttgttgctgggagtaatttgaactgttttgacctggcccaagagatttcaaaggagaagaatttcagaatgtgacataaagactgtttttgtggtatttgagtgaagaatgtagctacttttgggcttgtctgaaaaatctccctgaggctaaggtgaagagactcagattaattgcattgacaaaggaagtttcaaaaaaccccagcagagactttgttctctggttaaatcttatgaagagaagtttgaacaggtatagcaagcttagaaaggaaaaatatatggttcgagtattaaaggtgtaccaggaagtgaaatggagcaaaattctgtgttctaggagataacagattaagggagtgggactttggggcaagatcctacccagctaaatttagatccaggcatggtggtgcacacctttaatcccaggagacaggcatgctgatctctgcattcaaggtcaatctacagagcaagatccaggatagccaagcttaggcagtgaaggatttggaaaacataaagccagtgataatgtaatattataagggggttatgttctagttcctgcaagcagcagaattcagcagcttcagccatgtggctcagctctgaagttataagactggccttggtcatggtgtctgttcacagcctaaaaccctaactaagacactcttataagagttgctgtggtcacattagaacaatgactaagacatgattttgcagaggacctgaatttgatattcagctctcacatctggcaactcacaaacctaaaactcttgttctaggggaatccaatacctctggaccctgtggggacatgcattcatgttgtgcatacccacatatagacacacatagttaaaaaataaaaatgagtaaccatgtgtgatagcacatgcctttttttaatcctagtattgaggtggcagaagtagataaatctctgtcagtttgaggccagtctactctacatagtgagttctagaacacctagagctacataataagaccctatctccaaacaataacaacaaagataaaataaaaataaacctagtttaaaaaaaacaaaacaaaacaaaaacaaaaaaccaccaaccttaatggatctatagtctgatgaaacttcttttgttttgtagtgtgttgatttctttcctgactagtaatgttttttcctaaaaggattaatcatatgtgccgctattttggtcagagtaaggttagaggtgtagtagtaaacaacagtaacagcccccctaaaatctcagtagcctaactcaaaggtttatttctggccttgaaacgtagttgagtgacagcgtgtgctgagtatgtgagatgtctgatctctagcatcacaggaatacatcaaaatgtaattcttggctcatactaaatgatggcttagcagaatgttccgctggcactcgggtaccaagcataatagaacctaagatgtgttctgttatcactagggcagtgagggaaggaggacaaggagacagaggatgaagaagaggatgaggacaaggacaaggaaatgagtaagtatcagatcttgaagtctttgcctcaaagtgacacatagaatctcacaggttattggtccaattcacatagtcaggttgatctaaaatggaatggaagacatacagtcctgacattgtttaggagaggagacttcacaggtctctgaacagacattaggactgtgggagtccccattactggccaccaaataccctctccctgacaaaatactctcacccagtcatttcagaggaagtcaaccccaaagtcttattctgatccaaccttcattctcagacaccttaatctactgagaggtttttaatgtgggaacattgacaatactgtcggttagctcattatttcatatttgagtgttttattattttgacattttttaaatctaaactgagaagcagttcttctcttagtcctattagtctttggattttgctcttctttcctagtctcaaggcagccagttccctttatctcatttcttgttaaagtcagccaagtgttcaataatattttgctacagattctctgcaaagagtccctgagaggccattgtgtgaagctcagaaggtaaggcttgtttcaatggaaacactggaatgttatggggtagaaactaaagaaagctacaggcagaagggagaatcccaagagagaggttagatgtattgcaggtggcaggaccagggacttgaggctgcccaatgccccatggagcccacctgctgctgtcatgagccctgtgtggagctgagtgacctggcatttgccttggtgggtttcggtcttgctttaggctaattgttctcagctatgctccattctcccttttagaaagggagtatcttagtttgagtgttagtgctgtgaagagacaccatgaccattgcaactcttataaaggaaaatatttaactgtggctggcctctcctctcctctcctctcctctcctctcctctcctctcctctccaatttcagaggtttggtctgttagcattttttctaaactccaccccacagttacctggcaaaagctaggtaggcctgatccactataaaaggggctgcttgccccctcctccctctcttactcttgcttccctcttgcttctctcttgccctcttggactcttccctttcctcttcccttccccctctctccacatgctcatggccatggccagcctctgcttctcctctcctctcctctcctctcctctcctctcctctcctctcctctcctctcctctcctctcctctcctctcctctcttcttctctctnnnnnnnnnnnnnnnnnnnnccatacacccccatagaacatatcttatacttctttatctttttataaacacatcatggtccattatcatcctggcaggaaacatgtcagtttgcaggcagacacgatactagagaagtctctgagagttctacatcttgatttgaaggcagcaaaaggagacggtgtcccacactgtgttattggactttggctaatttgtgggttttttcttccatccttttcaacccctcttcttccctttcaaccccctaacactaagtaggaaagaaggggagaggagagagagagaaagtgagagagagaaagagagaaagaggagagagagagagagagagagagagagaaagagaaagagaaagagaaagagaaagagaaagagagagtccctgaataaagtcaggggtaggaaagggcacaagaatagcattagactactttctgctgattaggggcatcaggttccttggagcaagtttgatcttttctgtcaggatatctaatttcttcttgtttcttctgtgcagggctatttgacaaaccacaataaaccacatacaaccaccacctggccaaccagccccttctgtcagggctctagcatttatatagcctctgaaaacaacccagaatttcaaatgtctcgcagctggcaaaatcacacccctgctagagcatgaggcaaatcatagtcagctgctgtagacaatcagaagtcaccctatatcccacacctaggattaaaatgaaaacacattcttataatacttctgtgtttttcaaagaaactaaaattctcaccacaatactgggagtagcttgaccataggagacctcaaagcctgttcccaccatgacacacttcttccaacaagtccatacctactccaacaaggccacatttaatactgccactccccatgggccaaacattcaaatacatgactctatgggggccatatctattcaaaccaccacagggagtttttattctgtgctattgtgttctggagtatatagcttattttaaaaagttttttattggcacatattatatgtgataagtttcatacatgtatatattttgattgtattcatcccccccacacattaccctctctcatctcccttgtactcctgccaatctcctccttcttccaagctagttctgtttcccctttcatgtcttttaaaaatattttgttttcatggtgcatcgatgaaatttgttagggttctttacaggaacagtgctgagctgttacttacatacagtaacatgggcaacttgctgtggctatatccctgaagaaaatatctttccttctccaaggaaccattaactacacatagaccttggctcacaaggccctgtgcccttcatccttaatggaatgttattgggcccagtcttgtgtaggcctcctataggtaagtatagctgctaagaggtcaagaatgcatcaggccgggtggtggcgcacgcctttaatctcaacacttgggaggcagatgcaggtggatttctgagttcaaggccagcctggtctacagagtgagttccaggccagccagagctacacagagaaaccctgtcttgaaaaacaaaaaataaataaataaataaataaataaaattaaataaataaataaataaataaataagaatgcatcagacctgtcctgcctgaaggtgatgttccatagtactctattgcttgcttgggctctattctttctgccccttcttccacagagggtgacttgctttttaattttgcaggatattacagtgaggagattgctatgaatttcaaatgcgaatctgtggtcagatgtgacggagtgtgccttttattctaccatttgaaaggtagaggtagatggatctttgagttccagaccagttagggttatgtgctaagaccttacagagacagacacacagacagagacagacacacagacagagacacacagagagttagacagagagacagagagagggagagagagacagagagccaagagtcactaatggctgcttcctgactttgatacatgtcaccaggtgtctcatgctccatctgttacaactgtattggtccttgctgctatgactttctaaccaggatggatcaatgtggaccacactctgaaactgggacccagagtaattcttgtttctgtaaagttgcttttctcggatagtttgccataacatctagaaaaacaagtgatatagggaatctcaaaaaaaggtgggacgtgatctagagccttgtgagagatgtgggctggatctcagaaaccactaagcgggttgtggggcaggaagctgtgcttgccaggtctctgtccctgtgcccctgtagctcagcaaagagtgtggagccagcaagtaggctttgctcattgagcacaatggtagagcaagtcccttagtgtgtcggggcaggggtggtgcaggggtgtgtgggctgacttctcatctaccccctcaccccaaaacagaaagaacactttgcttctgtggggaggaattggatttatcaggtttttcattttaacttcccggtgttaagacattggtgcacacctgcaatcagtaatcaggacagattctggctatgtagctcaagttgtcctagaactcactatgtaacccaggctggccttgaactattgaaactcttcttgctttgccctaccccaccccaaagtgttgggatcatgtctttgtattgcatactcagctgttaacagaaagcttagtgagtatagtgcaagttgtaggattactagcctttgctatctaggtcagttccaaatacagggctcaagaagacagaagcgcctgggggtcaggaaagccagagtcagtctggactctgtcagtcaggtagtcctcccagtagtctggaagagagtgatggtcgtgaagactgaacaaaatagactgccttggatatattttaatagctggactcatgggtgctctggacactggaaataaaaagagaggagtaagggtgcttccctgtatttcattttgagaatactggatatatatatatatatatatatatatgctggataatagtgagactcttggggaaggagcaagtctggcggtcaaggatgattgtgaggtggtgatgagatgtggagttgatactaggcagctagcaacattagggctcagcctctttttaattaattaattaactaactaatcaattaattaaatttgacacaaggctttacttgtagccctaactggcctagaacttactttgtagaccaggctggcctcaatctcccatgagatctgcctggaatgctggaattaagggcctgtaccacaacacacagtctctctaaagcaaaattaattaattaattaattaataataataaattaaattatttcttttgggataggatctcctgtagcccaggcttgcctggaactggaatccttggatcttttacctcccaactactgggattttgttcaggtaccacaatttccatttttatgcaatgtcagaggtcaaacacaggacttcttgtatgttaggcagttagataaacagtctacaagcagagctgaatccctaagcctgcctggattcgaatttggtgatgcagtctaagctgcagatatttgaaaatcgttatattatagaccaaaagtcaagagttgaatgatagctctgggtggttgaataaagatcacagctgagtcttagaatctcctatccttcttctttctctctctctctctccccccccctctctttcttcctctctcccttccttattctctctctcccttccttccccttccctccttttttccttccttcctttcttgttcccctacccctaccccaggtctctttgtgtagccttggctatcttagaacaagttctgtagaccaggctgacctcgaactcacagagatctgcctcgtctttatagcaaattccagggctgaatagtgagactcaggagagaaaaagggtggagggcggaaaggagggagagagacgaggagagaggaataggggtgggggtggggaagctacctagtaaagagacaggaatggaatgttgggacagtggcagtgatgtggaggaaagttcaagaactctgtttccagagaaagcaatcacatcaactgttagcagttccctctaggcaattgaggtaagccctgggaactgagagtgggcttcgaaaaggtgtagatgagagctcaagatagggcaggcagtggagctgcctcaggataggtttggaggtaatgccactgaagaaatgggaacaagtacttgtagaaaaatgaagtcttgtttgtgaatttattcagtgaagaaagcggagaaatagagtacccattgaaggtaattttggatccagaggaagcataaatttaagtaaggaattttggttatgtttatatgctgatgaaaatgattccttgaagaaagggggttggaactataaagatactggagtaaaacatgtgggcatgtgggagtgaaataatccaggtcactggtcaggacctggccttcttgaattcagagtaacccaaatgttaagaggattttgatagtaaaaagttgatcagttaaaaaaggctggggttttgaaggaagcttttagtagataggagtaagtctaaatatcaatgtaggtgaagaaaacccttctgggattaagcacaccccaccccccccaatccatttttctcttggtgagccttttaatctctatgctgttcatcaccattagtaattatatcttaatagttcacagatctgtaccccatgagcgacaggtcagggatcttctctaatttctgactacccagggtgacgcgatgaataaatgtcttcagaatttgccttagctactactgttaaatgctgtttaggagagtccctttttcccctcagagcttttatttcggaaaagataccatgggaatgatatatatatatatatatatatttttttttttttttcttttttggcctaactgcctcatcatgaggatctgcgtaaacccagaaacgcttcgtcaaattctccttagacaaaactgactaattggctagttgtgatcgaccggcagctgggtagggtacaggtgcagaacgcatcttgcgcatgggggcgcgccgtggcttcagtcaactggggctcagagggcagccgaaggatgagactgaggccaacacctccccagatgtggcctcttccctgggcgctactggctcggccagtgtgggggcggggaggccgagggggtagtaactgtcaaactcccgcttggcgccattatttaaatagtgcgtgtgggtctcgcagctgtgcgtgcccggggcggggcagcgagctcctggagtggggcggaggccaggggcggagcgggaaggctgaggggcggggtggaggcggagtcaagtccgctagaggggaggttccagcgcggcccccggcgagcttcattgcgcttgcgctgacagacgcaagatggcggacagtgcggaactaaaggtaaagcgcagctcgaattcacttctaatattcggccgcggagacggcgccgcggctgccggggggatgggtcggaccctggggggcccgctcgggccgggctccacccgagtctggagttgtaggcgggagaggcgctccgggccttagtggagggggcctggctgcggcgggccgtgggccccgggtgcctcgggggcgctgacgggtcgtccccggcgtgttattgttgtgggcgcctctggcgggggtggcggggcgaagagagagtgagtcgggacgtggcggcagcggcggtccccggggcctgggtgccttacnnnnnnnnnnnnnnnnnnnnnnnnnnnnnnnnnnnnnnnnnnnnnnnnnnnnnnnnnnnnnnnnnnnnnnnnnnnnnnnnnnnnnnnnnnnnnnnnnnnnnnnnnnnnnnnnnnnnnnnnnnnnnnnnnnnnnnnnnnnnnnnccctccgcggcgcccaggcgcccccgcctcgcttgccgccgctgcccgcccgcctgtcaatgggtgcccggccagagggaatgcgcgatcccggggcaatcggctagggaatacgagggagaagctcttggaaagtttagcgagcccggagccggcgttgggggttcggctaaagggttgcagggggagtctgcccgggcgggacgttactgtttctctcttgatttcgggccaccggggagggtgtgtgtgtggtggtggggagcaacccattgaaagagtgtgcttttgggagcggtggtggggatgcagccacctctctgcactcttgctgtctctggtgtggcagatgagagcagccttgggggtctctaaacacaccatgatggcgatgctatagctgatggaggtgaatggttcgtgtttatatcccccgttgccttttgtttgttagggacatcttgctggccatgttgatttaaacgaaattctcctcccacccaccccccatcccaccccaacctccaataaatagaacgttccatcgttcctctcaactgtaccaattactcatgcctcgcgaaattagatgaaagggtgccccctttcccccgctttttctcccaccccaatctttacctgatgatggctcctttactgaagcacatataccactacacaagcagttgggggagggctggtggaacccttatgattggattgtgacaaatgggtctctgcttgaataattctggtttagtagcaggcaggcagttcttaactaacgcatattatttagaggctctgaacatggtattcccttctctggcttcctgtgtgcgaaccaaacagctggttatagcacatctctgtcagagtggagattgggctatgcaattataaatcctcagggagatttagaaattctttttataatcaataaaaaaaattattattttccccattataatgaaataacttctaaaacaagcagaccactacctgtgtttctggacacttttctttccgtgcacctgtgtgtgtgtgtgtgtgtgtgtgtgtgtaaaagcctcactggaagatctttttttccttagtaactttggagtgttaacatatcaagatttttgtacaagatttgggtatttgttttttttaagtttacttctaattactaacttgtttaagacagaaaatcttaatggatagcgcccccccccctttttttttaagacagaggtttgctatgttgctgaggttggtctggaactcactgtgtagacagaccatacaggctttaaacttcagggatcctctagcctctgcctccttagtgctaggattaaagggattaaaggcattcaccaccattcctgacttggatagttttttttatcccaatttcagactattgatttcaccaagaaagcctctgaaatttaacattttggagacaaccaccttgcataaaaacaaacgaacaaaaaaccccagagctcaagtatgtgtattttatgtaattatttttctgtcactatgttactgtcatcttttatttttgattttgttttgaggcagggtttctctctgtgtagccctggctgtcctggaactcactctatagaacagactggcctcaaactcagaactcagagatctgcctgcctcctgcttcccaagtgctgggattaaaagcatgtgccacccccatcctcttcagagttgctgctgtcttatctttgcttcctaatactttttaggagtcaatttgaaaaatagctggccaagttttttatacatggaccatgtagtaaggcttgaaaaccatatgggaaaagtacctgcaaagaacagagtacctttgttgtttctattttaagaaagtgccttcggggccaggcatagtggccccatacctttaatcccagcctttgggaggcagaggcaggtgaatctctttttgaggatcagctgatctacagagtgagttccaggataggcagagctacttagtaagatcatgtcttgataaaataaagaaatagaataaagaaaaaggaaaaagaaagaagagtgcctttggggatagatgagattcctggtgtgagtcttgttaggtaaagtttactctttacagaaatgagtcagtatcacacagactctgaacacttaatggaaatggtatttttctaaaactggtctccattttttcaccctctctaaaagctacttgaaatttccagagggtttgttttccactcttatgtttctgttgtataatttttcaaattataataagtgttttgacacattggtgtgtcattgtgtgtgcctgagacttaaaggagctgtgatagattacttagctggtgatagctgtggtaaaagtcctgctaaggcttcattgtggtattgctgctttggagagtaggggcgatgataacaggaatgcatatctttgtgtgtgtgtgtacagtgaagtttggaatatattcctttcagaaatattttctttagggtgtgcatgtgtttgtgtgagtgatgtgtgaaagatattggtcatatatgctaataaaatagggaaagtctaaataattagggggaaccctagatttttttatttttaagttttaaatgaaaatacagaactctaatgggaactgctgaggaaacactaattttttttccttatcccaattcacagcccacatttgactgtgcagtggattgtatttataattattttcctaatggcccttttagtgaatccttttaaatctatagtgattctgctaagatcagatgggaaaaacagatccaaagcccccgtagggatagtgcaagcttgaagatattgccaataaaaagtagattgagtcatacatatcaaaatgagttctctgtgcacttctgcttatgaagagttcaagttttcattaggggaatacccacaaatgatttctgggaggctgtgaaggtgaaggcacttcaaacggggaggatgtgcagcccaagtgatcttggtagcgataacctgacagtttcattgtagttactttgatttgttgttttcttaagacagtctctctctgtgagctctggctggcctggaacttgctacgtagaccaggctgacctccaactcacaaaggtctgcctgcctctgcttctttctctgcagtgctgtgattaaaggactgccaccatgcctttttaaaattttatttatttatttatttaatttatttatagacagctcccttgcttttaatcctagtaacttagaaggttaagatttaagtaatgtgagttctaggccagcctggccttacatggcaagactctatctagaaaataaaccaggttaaaactaaagagaaaaaaaaaaaagactcagatgaccacaaaataccctaaaacagtggttctcaaccttcctaatgctttagtacagttccttatgttgtggtgactccaaccataaaattatttcgtcgctacttcataactgtaattttgctacttgttatgagttgtaatttaaatatttgatgattggcatatctgaaaagccattcctgtgaaagggtcgtagttctgcctctaaaggggtcaatactcacaggttgagaacctctggtctaaatgaagaaaaaaccacaatgataacaaaaataaacatttttcttttagagtcaggactcactctgtagttcataatggcctggagggtgacagcctttttgcctcagtctccagaatgctgggatatcagcatgagccaccacactcaccttccaaagtcattattttttcttaaatgtcttttgcattaaaactcaagttgtattgctgttaactcatagaaggagcactgggggaaggattcatcactttcaaggagtaaataatggaatccaatgagcagggaagcctacttttaaagtatctgctgtggaagtgtatcagtacattttgttgtcatatctgtctctttattttcaacaaataaccacttagttttgatctctgtggtgtaattcgtctgcttttatttcacatagaagcaagtaagtctgacatgttattcatggatttgattttaatctctctgacttgcttttatgaagtgctgcatttagatggcttttgttttatgtcacttcttgggaacagtattttaaaacaatttggaaaacacttaagtttttaagtagttgatgtaattgttttgaaatattgccgccttttccttgctggttttctccgggtgactgcattgtctttctcttccaggagtgtctcctaatcccctttgattgcagtagctgattaaccttgggttcctcctggtgaactccatcagcatgctgttccagggttcatgctgaggcttttgatttcagtgtaatttgtaccctttcatgctggtaactaggggtaagaaaataaagtggctgtgtttgtagtgggatctaggaagaagtatctgccttcagaaagtgggattttataagctgtagcatactaaaaactaaacaagagcttggttcattacttcacagaattgatggtactgttttcttaagtgttcagctctgtcactaagcatttcttttttgtgtagctctaactggcctttaactcaccgtgtggctgaagaaaaccttgagctcctgatgttgtgtatctctcctaagtgttgggatgatgggcataagccactatgctctactgtcttcttcttttttttaaatttatttatttattttatgagtacaatgtcacatcccattacagatggttgtgagccaccatgtggttgctgggatttgaactcagaacctctggaagagcagtcagtgctcttaaccactgagccatctctccagccctctactctcttcttttactgtttgaagaatacttgataccttagttttgtagtgctattcagtttataatgtatcacataacttttgcttttcgcatagttctttgatgtagtaggaggggaatgagcaaggtaaggaagcctggccagggcaagtgttaccagccggcctccctaaaatgccaaggcagtcctggagttgtttaagatgcctagctcactaagtattgtaatgctgctaagacatttcctttagttctatgcctggctattttgtggggacactatgcatttccagtgtagagccctggctggtctgtatcttacgatgtagaccaaactggccttgaactcacaaaaagctgccctccttttactccagaggactgggattaagatgagtgctaacgtgcctggttttgcaaatctctctttaaaaacatttggactttgttagttggaatcctacaaattaattttctttcttttaaattttttttgagacaggatcttttgtttgtttgtttgcttgcttgcttgcttgtttgtttgtttgtttccagacagggtttctctgtgtagcattggctgttctggaactcactctgtagaccaggctggcctcaaacccagagcttcccctgcctctgcctcctgagtgctgggtttaaaggtgtgcgccaccactgcccagctagttttgtttttttcttcctttttttcccctcttttaattttgaggttttatttttattttatgcctttgagtgtttgcctaaatgtgtatctatgcattattttcatgcagtgcccacaagggccaggagagggcatcaaatcccctggaattagagttacagaacatttctctgctttgtggatgctagggatcaaaccctggcttctgaagagcagccagctcttagctagccactgagtcatctctccgaaccctcactgtttggtttttaaaaagagacagtctcactcatactaagactaacctccaactaactaagcatagcaatttttgcaattactattttgcttggaaattttttttttttttataaaatactaaaaagaagacagaaaaatagcacttataattttaactttcaaaaatattacagttagccaagcagtggtggtgtatgcctttaatcccagcacctgggaggtagaggcaggtggatttctgagttcgaggccagcccggtctacagactgagttccaggacagccagggctacacagagaaaccctgtctcggaaaaaaagaaaaagaaaaaagaaaaagaaaaagaaacactacagtttaacatctggggatctatatgtagactttcagtgactgtaggtatatatatgtatacacacatatgtgtgtgtatatatatgtatatatattcacaagaaagaatcacagtattaaaaattatatatatatatgtatatgtacatatatatgtaaacagacacacacatgcccagtatacatatagtatacatacacacgtatgaatattgtcacctatagctcaggttgtcttttaagttccctatgtaatgtaggatgaccttgaattcctggtcctcctctccaccttccgtgttggggttataggcaagcctgatgtatgtcatgctgggacttgaactcaagagtatcatgaatgttaagcaagcaatttatcatctgaactatatccacagctgatactttttgtaatctgttatttttgtgacaagcctttcaagtttgtagatatagatcgaggttgctttctattttattcttctagtagctcaactttataaagttgcttctctttggggaggggcctggtagtgaacccttcttgtgatgttcatgctttggcggatagccttgtatagagctttgcaaatgattttaacacctcagaccttagagctgtgtagagagcagtacagctctttctgattcaggtgccctaagtggagtggattagtagcttttagcttatttcttgtttaaccttcattgttcctatttcttttgtgtgtcaggtgagattacattgataaagaatgaactccatgatgatatagcatatttaattgatttcaagtatgtttgattttggaaattatattaaagtaatcaaatattgtgagttttgtgcactaggtgcttgtcagttttaaatggcatgttgaaactttattgaacattaatatagagaaagtggaaatgagaacaacttttcattttttaatgtgaaatcagtgttgccatggttttaaattagtaggtaatgctgtttggaggagctagttatggaaaggttacataggctgtgaaaatatttttctattttaagaagaaacctttttgggttatagtaattaataagtgcacatgtaagttaagaatactttttttcttttcaaggctctgtcactgtgtagtctggactagtctcaaactcagggttttcttttctcatcttcccgaatgccgaggttgcaggtgtgtgctaccacccctggcgagagcactgctgtatctggaaagtcgtgaatcatggaaggaaccagtgatgaagttaagctgtgggatagattgtgttctacatttgttgtaaatttgctcactagtgttctttctgagtaggcggcagaagtttttaaagtacttagttgttttgtcctataagtgtggatgacccagggtttatgctttggctttagatagttacatagtgactcacagacgacccctggggtgagccgaggcacagagcagtagattctgtgtagtcagagctgactctaaggccagccactacagtgcacggtgtggcctgcttgaggctttatcagggtatagctccctcctgtgcacagcgctggcgtggtagccctgtgctttgctaatcctacctaggcctccctcctgtgttctaagccctctgcttttggtttcagtggtctcacgtgaaaaggcagaaaagcctttccctcagactttggtcaagaaaccaccttttatttttttcttaaatcaagaaaatgaaacaagtgtgaatgttttaaataggaaccagttctggatattgacagcactgcttggtgcgaatgctcttgcatttgaaaccatcgcttccttaccttttctgctgttcttgctttcagtttctctttttggttgtcatgttaatttcacacagactgttccttcaccctgtgacttctgtctataaacactctttgtggagctaggtctggtggtgcacgcctttaatcccagcacttgggaggcagaggcaggtagatctctgagtttgaggccagcctggtctatagaacaagttccagaacgggcagagtaatggagcgaaacactgtcttacccaccccttgccctccccacctccccaaaaaatccacaaaaagttcagtgaacaaaacaaaaataaaaaacctccgtagctttgcctttaacagtcagtcttagctggtatgatactcagggctctctccagtttgactgcagaccattttgtgtgtcttgtactttcttggctgtagcagaaaggtctataacttgaagagcagttactcatttgctctgttgctgactgtgttccctcctagtagatgtttactatctttcagcttcacaaatgatgttactgtttgttctccttgggacccaggctgatgcacatgtctgttgtgacagtctaaattggaagcatctctgaacagtgtcgtgtctttactctttccatgttggtacttagattaacttggatagtttgtccagaataatgtttttggatgtggaccatgcggtgggtatcttggaactggggcagtggatgggttgttgttaagcaccatgtataacattgaagttactcattgactttagccctgactgctgcaaaaggaaaacaaaaagttctaagtacttgtttttggtgtcttgaaactgtattatgctgtgtatcccaggttgcccatgaactgatagtaatcttgcctcagctttccacttgctgggactacaagactgcatggagtgtttgatactttgttatgctgctgttgaaagcaattaccacccctccctccaccccacctcttggttctgagaatcaaatccagggtcttgtgcggtctctactattgagctgtttatttagctgtactacatttagtgtaactagtccagtattagtgttgggattggatttgaagatagatgtgacagggccaggnnnnnnnnnnnnnnnnnnnncatgagatccaactgtaaggcattttcttaattagtgatcaagggggaaaggccccttgtgggtgggaaccatctctgggctgggagtcttgggttctataagagagcaggctgagcaagccagtaaggaacatccctccatggcctcagcatcagctcctgcttcctgacctgcttgagttccagtcctgacttccttggtgataaacagcagtatggaattgtaagctgaataaaccctttcctccccaacttgcttcttggtcatggtgtttatgcaggaatagaaaccctgactaagacactgaactacagagtgagttccagcatgacaagagttacacacagagaaatcctgtctggaaaaacaaaacaacaaaaaagtagatgtgatgaatgtaacaggtaagggtattggcttaaggaaaaatggactgtggccttaggttctggtagtgcacaacaaagcacttctgcatttaagtttctgaatgtgagcaagtttgtttctagttacatgacacagtgcttaaaatagaacttagctaacttgtacttatatggtgaatttaaggtgttttcctaaaaaattgtcacatgggtcttattcttaggatcagaaaagtttcagagtaactatgtagttttgtttttaaatttttaaagtatctctccaaaggttatttattttttctgttttaaggtgctttatttatatcataatatctttttaattgacgtgtacttgcacatatgtatgaggtaaatgctttcccagtactttaaaatcattatggctgggatggtggctcctttgatcaccagcactcaggtgactggggcagctggaggccagtctggtttacatatgtagtgacttccagaccagctaggagtagtacataataagaccctgtcttgaaattaaatagatagatggagagagagagagagagagagagagagatattgagattgtgattgttgtagattccaggcttctacaagttgcccaaaaaaggaatgaggaggaggtgtcagggttcctgacacttgactgagcaacccgaggaggggacaggagggttacggtggctcctgatttcagaggtttcagcccatgtttgtcccattaccgtaggcctgtggtagagctaaacatcatggtggcaggagcttaagaagagccatcagagaggagggggccagagacaaggcacccttcaaaagcactccccggtgactgacgtcctctatcagggccccactcttaaggtttcttccactggtttctaaaatagtactgctgccggggaccaagttctgacccacacgagcctgtggggacactcatattaaaccataacattccatgcttagaacttgggttatagtgtagtagctaggatttgattattatttacaaagtgtctcacattcttccattcatttatgtgttttgaatgtgaggtactagactattggcttgagtgtatatataattacttaagcagaaaatgtatgtgttttatgattataagtgcaatgcatcaactattactatcataggggttgtttctcagactcctggtgtttccctgggtatatctaggtcaaaaccatttttctagtaccagtaggactttgtttggtatgctgacaattacaacatcagtgatgaataaagccattgtgattttcaagatccctgctgtggtgtgactgaattataccagtggtatagtctcatcatcagacttttggaattgaaatagatatatgctttaaaaataaaacaaactggacaggttatgtgtctggatagtagagtgtttgcctagtttgcctgaggtcctcaatatgattctcaacacacacacacacacacacacacacccacacacacacacactttctcttcctctctctttctctctatttctttttctctctctcaagtaaaagtgcacacacatggtgtgggaactcaggaagactgcctggttacatttaatgcccttgatgaaggaataaaagttagtgatttgtcattgagtccgtcttagcttaccttttagagcgtgttgtttgaagtgcttctcctggtagcaggcctgatgattagctcagaaaagagctttgtgcagttgttgagctgcaaacgaaactagctgcctttctaagtagaacactatttttacttgaaataattgcttggcaaagtgtggttatacagaacagggtgggatttggcatacattttcctgaaaataaagtaagcctgtcactacaaggaaaacaactgacagtattcattgctaatgataaaatttaagctttcaaggggaaattgaattttggaaaactactgcacttgccactaagagtttgacagattgcacactttactcctttgatgcaattggtgtgatatgagtaagcgagctatgctttagacagtagtgagctgcatcactttttgaagaagtgtggaacttggcaaattctccatgttttgacatgagatttcatgtagcctaggcaggttttggactgtggatgtagctcagcgtgaccctcctgcctctttcaagtgctaggattttaggtgtggaaccaccatgctcagctgaactcaactttttttttttaaataaccagtgcatggttttataaagtcatgtatgagaaaaaaagatcaattggagtggagattagaccaatgaatttttgtttgttgagataggatttcatgtagtcctaactggttttaaatttgtttttgttgttgttttgagaaagggtctcagggatcccaggctagcctcaagttctctatgtacctaagatgaccttgaacttgtgatctttctgtgttcacttttaaagtgttaggattatagacatgtaccacattgtttgttttttgtagtgctagaaattgaactcagggcttcccagggtttcctgctagataaacactctactaaatggaactatagtccaggcactgaccttcgacctccttttctcctctttgcacttaccaaatgctggtattacaaatgtgtaccaccatgctttgaaatgacttttggttttttgagacagagtttctttatatagtcctgtctaacaatgaacatttgttatttattaaaagtcattttgaaagtcaggtgtggtagtgcacacctttaatcccagcacatgccttttgagtttctgtgctgacttccctcagtgatggactgttaacgtaggatatactacaattaaataagaaaccccttcctggagttgcttttcggtcatggtgattatcacagcaatagaaactctaattaagacaaaatccaatgttttctgttttgatttgtaatacagtagatttttctttttctttgtagtcctggggttcaaacccagggcctcttctctgataggcaaagagttcttccattgagcttcagctccaatcctagtaacttagttttgatagattcaacacaaagggaaagggctatcttccgtttccttccctccctccctcccttccttcctttcttccttccttctttttttttttttttttttttttgtataaaatagagtttattcagggcatagggagggaagttaagagggtagtagaggcagagaaaggcagagagagggagagagtagagaagtagaagtcggccatgaacatgtggagagagggggaagggaatagggaagggagggaggaagggaagagcccaagggggcaagagagaaacaagagaacaagagaggcaagagcctccattttcaagattataaaaactgtgataatgtaaatattttttgaaaaaatatgaagagttatnnnnnnnnnnnnnnnnnnnnnnnnnnnnnnnnnnnnnnnnnnnnnnnnnnnnnnnnnnnnnnnnnnnnnnnnnnnnnnnnnnnnnnnnnnnnnnnnnnnnnnnnnnnnnnnnnnnnnnnnnnacccatagctgttagtgatgtcctgtatctctgcagccagtgtgctggatgaatgtgctggaagtgctttcgatctttaacggtatgaggaatatttatttttttgttgtttattttatttgttggttttttgaggttatgtctcaaccctgcattgtcatgaatgagaagtgtatggacaaatgaacagtctgtgagatgtgctctaacccaattgtagctaataatttcctctctagcagagcttagctcttgcaaatatatctgtgattgatttataatttacatgtttttttctatctctcccttttgggatgaaagccaaacagctatacaactgggtccttttacatttttgtctacacttttttcctcattctttgacaacttcgtatatgacaatgcatataatacattcaggtcaccctacccctgcctacacttcttagggttctagtcacgccatcctctgtctgcacttacgattctggtcatcccagcccatctgtatttctcaggatggagtctggaaaactggcttctcctttcctccagtgtctttgtaggattttgagactgaaagaaaatcagatgaggtgcatgtctgtaaccctatcacttgagtggttgaggcagaaggattgctgtaagtttgaggtcaacctaagttccatagggagtctaaggctagcctaggaaagactggaaaagaaacactggtctagaagtccttctaatgagatttcacaatattgtagcctcttaaaggtaaaagacctcttaagagttgtgcaatggctggagtgatgattcagctgttaagaacgctcgctgctcttgcagagggtccaggtttgattcccagcacccatacagtgactcccaggggatctgataatgtcttctggacttcataggcacgcaagtagtgcacagacacatgtgcagacaaaataactacatataaaaattattttaagggctggagagatggctcagtggttaagagcactgactgctcttccagaggtcctgagttcaattcccagcaaccacattgtggctgacatccatctataacaagatctgatgccctcttctggtgtgtctgaagacagcaacagtgtattcacacatacaaataaatacataaataaataaataaataaatctttttttaaaatttaattttaaaaaggggaggttagaggcacttggagagatggtttggtgctaaaagtgcttgctatgcaagcattagggcctgagttcaagtccctaaaacccaggttaaaagctggatgcagccatgggcctgtgactcctgtactgtgtagagtagtggtataactaaaacagcttcttcaagattgaaatattccatcctgtaggaaagctctttaatcaggaaggtaaacaacttaaacaacttcaggaagtccctgaaactcatattcactagggccatacctgtcagacagaggaaaggctgagattccttttgaggctagctgaacagagctgcaaagaaactcagacaagctgagctgcaaagaagactcttgagaccagaacaactgcctgggagaaacaaaaaccagttgagatgcctagaagttgtttagaccaaagtcacctggaaaagacacacaccaacttattgagcttcctgaaggctgtgctatgtactgcagatttcccaatttttgtgagctgtcaatcatgcggggctggtcttggtgatgcagttgtttttgagtcatttctcctcttgtaggtacaaccactcacccatactttaccattccagtaaaacttaggatttaccaagttggactatccatacattggtctgtcctggggtccctatctagaatgaatagacatgtgtgttatgtttccccaaggaaaagtttgtcatacaacagctggagtctagaggattgctaggccttaatggttggcatcctagctctagattcagtgagagaccctgtctcgagggaataagacagatcagtagagcaggggactcagcagcagcatctggcccctgtgagtactggttatgtacatgatacacatgtacatatgcatatacctcccacatatcacacatacaccacacacactacataatgttttgcatttaactataattagagaaaagaacatgtagttagtgtaattaaaacctgaattaatttttttttcagttgtacacattcattatacgaaatgctggtttgatgacattttcatgcatgtatagcatcatgcatgtatagcatcatgcatgtatagcgtgtcctttgtttatatacccctcactgtcatgccttatagttctattcccgctgctccccttcctcttctcagatactcccttatacacgaagtgcatgtgtgtgtgcacactggattccacatacaaaagaaaaggcatttgattttgttttgttttgagtttgacttaacatggtgcttcccagttccatccatttcttgctcatgccatcatttcttctttatgagagaataaaagttcattgtgtgcatatacaacattttctttaccccttcatctgttgatggacatctaggtgatccagtgttggctgtagtgactaatgccataaacatggctgtcacatacatacatctctgctttatgctgacttagtttctttgggtagatggaccccaggagtggtttagttggatgacatggtaatcttgtttttagttttttctcttttgttactcctgaacttggtctcaggaataatgcagactaatgggagcaatgctaattaataacctttaattccagactatttttagaaagttaattcttgctgtatgtagcaacttttacataaaagtttgtcttgactcttctgcacccattgtaaggaaaaatgagatctgtctttacttagcaggatcacatgcatataagcactgctggggggaggcctgggcagtgcttttgggttaaactggtgcatggtcagtggtcagttctttcttgttcagtacattttttataagtaaacccctcatcctgaattggtcagtgttttccagaatcgacggaaaggaacaagtatagccggcgatgctgagcatttgggtacagaggtctagaaacagatttgcttccctttctccgtttagtgaaatagcttcctttttattcatacatttgtttgcatatctgaaggaatgaggttgtctgtgtgaaccagtggtgaagactcagtgctgggaggtttagggcaagtgctttgactctgggattcctcttctctcctaacctcttgcctccctcctcaatggtggtggtggtggttgttttttaaatgtcatttatttttaaactagtgtttgctaaggtaaattaactacaatctattaatagcaaaagaaacttaaataacattgcctttgctactcagttgtatgttgtaaggcagaannnnnnnnnnnnnnnnnnnnnnnnnnnnnnnnnnnnnnnnnnnnnnnnnnnnnnnnnnnnnnnnnnnnnnnnnnnnnnnnnnnnnnnnnnnnnnnnnnnnnnnnnnnnnnnnnnnnnnnnnnnnnnnnnnnnnnnnnnnnnnnnnnnnnnnnnnnnnnnnnnnnnnnnnnnnnnnnnnnnnnnnnnnnnnnnnnnnnnnnnnnnnnnnnnnnnnnnnnnnnnnnnnnnnnnnnnnnnnnnnnnnnnnnnnnnnnnnnnnnnnnnnnnnnnnnnnnnnnnnnnnnnnnnnnnnnnnnnnnnnnnnnnnnnnnnnnnnnnnnnnnnnnnnnnnnnnnnnnnnnnnnnnnnnnnnnnnnnnnnnnnnnnnnnnnnnnnnnnnnnnnnnnnnnnnnnnnnnnnnnnnnnnnnnnnnnnnnnnnnnnnnnnnnnnnnnnnnnnnnnnnnnnnnnnnnnnnnnnnnnnnnnnnnnnnnnncccctccccttccctcccctcccctcccctcctgtgtgtgtgtgtgtgtgtgtgtgtgaaaagttcatctccatttaggcttcttaatatgtctccatgtatgtttgtgcacttcatgtttgcctggtgcccttggagtccagaagagggcatcagatcccctggaactgtagtcactgacagctgggagccaccatgtgggtgcttacatggcaaattgaccccaggtcctctggaaaaacagccattgctcttaaccactgagccatctcttcagcctctgacagtactgatttttcaaagacctactatagcctgaacacagaacacaactcctaagtttttcttagatttcccgcttcctttgtcgtacttccttcttacctttcacacagataaacaactcctgctggtgagtatgactttagctagaagccttgttgtttaagcttaccctactaaaggttacttcattaaggttccaagccctacttttataacattccatggccacccatgttcttatcccactgcctccttactttgtagtctcatttctgtagctcccctttagcattccctcctaccattcctgagtctgtccggggtaacactgtcctctgtcctggctaagctttgtgctaagtaagaccctgttggttagtgataaggagctctggactcaggaggcttggggtcaggcaacagcattttacagtcagacctcaattttttaagacttatttatttaatatatatgagcccactgtagttgtacagatggctgtgagccaccatgtagttgctagaaattgatctcaggacctctgctcactccggccccactcactccggcccccactcactccagccctgcatgctctggcctaaagatttatttattattatatgtaagtacactgtagcagtcttcagacacaccagaagagggcgtcagatctcattacggatggttgtgagtcaccatgtggttgctgggatttgaactcagatctttggaagagcagtcaatgcatttacccactaagccatctcaccactaagccccagacctcaaatttagtgtcagttttcttatagatagggtaggaattactaagagtttgtgttgtgggttcaaatttgtgctaagaaaagaaatcatgtttactagtacatatgttgcaggcacatttagacatttaacatacatatatattattattttaaagatttattaacttttatgtgtattgatgctctgtttacatgtctgtgtgagggtctcagatcctctcgaactggagttatatacagttgcgatctctatattggggttgggaattgaacctgggttctctggaagagcagccagtgttctcaaccactgagccacctctccagcaccacattttattattttgattcacctgagtcagtgacaaactgtaactgaaaatgtttctaagattacaagactgtactgattgtatgaactgtttcccaagagcataattcatttaatagttaggacagtatagaattttgcatttaaggaatcattgaacatgtataatatccccccttccttccttccttgtttgtttgttttctttaaaaaatgattttgagacagtcttgctttgtggtctagcctagttttaaactagcaatcctgtcctagtctcccaaatgctagaatttttgtgccactactcctggcaatcctgtgtgtgtgtgtgtgtgtgtgagagagagagagagagagagagagagagagagtgagtatgtgtgtatgtgagagtgtgtgtttgtgtgtatatacttgccccatagccagcgtgtggaggttagatgacaactatagatgttggttttcttctacttagtgagttccagagattaaacaggtagtgaggcttggcagcaagggcttttacccactgaatcatctcagcagctcccataatcccccttttaaaagtggaagtatacctcccaaattataatttgataagttagcgtctaaccagtatgaaagtacaaatcgtatgcattgtattaccctcctggcatgcagtgggtgttggactagcgtagttttaccctcctgctcatctcttgctccttcctaagctccctctgtgtatggagtaggtaggtgcctggccatccgtggaagaagcgtttctagcacatctacatgcagagcagtcttttccttaaataagaaccatattttcttgtctctgcacatgaagttggtcaatgtgttagtgttttaaattctagaattttaaattaaattaaactaaacttaatactgtgcccaaatttttaaaacagtctgagttagatttgttatttttagtattcatgttaacaagaaggagctttttgaagcctagagctttttgaagcctatagccatatgtttcatggaatgtggtaggacatagatggggatgacgtgtaaatcatctatcaaaaagggaaaccatggtaactctttcacaatgttaagtttgtacattgcttgaaggaaaatggcatctctgtttacatataatcacaatattttgtcatcttttgagagcatagtgtaatcagtatgatgggctggaggctgagagatgaaggtgctagctggagggctggtgctgcagatcactttccagttgtcttgtgttgagaaataaataacagatgagatactggaagggagatgatcatggagagggatgcccccaacctgatttactactttgactagaaactgtctgactaggttttctggttgaactaggtggtgttgacaaattgctaatctcccagttggttattaactgttttgtgattttatttctagctttattcttctcttctttccttttccttttccttttcctttccctttccctttccctttccctttccctttccttttccctttcccttctttccttgtttgttgtttgttttgaaagactatgcctttttgtagccaaggctactctggaactcactatgtagtagcctagtctggcctcacacagcagttatcctgcctcaggttctagtcttatagacccagcttatgaactatttctaatgggaatgatcagaaatggtccagaattaagaattttagtttcattgaataatctgactttaaaaataatgaatgaaatatttttattttactattcttttattaatgtatctaatttcttgggtagaagaagagaagaccagaactctcacttcgcatcctagcaggcctgcgccttactttgtagaccagagtgggctggaacttaatttgtagataacagacctcttacctctccttaatgctggattgaaggcatgagtcaccatgcctagcttaaatgtagaactttaggtttatagaaaataatgttatatctgaaataagacatcattaactgtttattttgtctgttaagaattcactctagtttatacttggttatatagtgattagtagataagattcccaatgcagagtctgctttctgactgacctgaaaccaccacagcagaaagtgaatgggagagattgtgtttagctgcaggggacctattcttgctcacaatgtggatactactttgttttaagatttacttatttaaatgagtacattgtagctgtcttcagacacaccagaagagggcatcagatctcattgagatggttgtgagccaccatgtggttgctgggaattgaactttggacctctggaaaagtactcagtgctcttaaccactgagctatctttctagcccccaacataagttttaataaggaagatcatagctaatgagaatgtaaaactggtattttctatttaattgccaaatgtacttctttcccttgtgtagttgggaataggtgtaggggtgtgtgtgtgtgtgtgtgtgtgtgtaagttttatgtatctgcaaaggaggttgagggtctttggaatgacagacattccattcctcactataattccctgaggacacttaatctttttttgggggggagtgggtgagggggagcttaggatctaaatgtcagtctgtgagaaagaacaaaatacacagaaggaagacttgttagaaaccctccaggacatgtatctctaaatgtaaacgcttaacagttagtagcccaggcagaaacatgctaaaaattcattgccaaggcatgatgctgtaacatttgagaacacctaaagagaaaagtctgcaagcttccacatgggcgatatacaggtaaccatgaaggattagagatgaatggtactggggctgctgtttgtttgagataatgtctcctggaatacaggctggcatcaaacacacattttagctgagggtgactttgatcttctgatccctttgcctctacctccccacgtgctgggaggtagatagcagagcatctaagttgttttttttttttttaaatgtttttaaaagatgtattatatattatgtatttatgtgttctgcctccattatgtgtaccatgcatgcctcctgccctcagagatcagaagaggtagtcagacccctagaactggagttaaagatggggggcaaccaccatgtaaatgctgggaactgagcctgggcactctacaagagcagcaaatactttgaactgctgagccttctctttagttctctttagtttagttactgaaccagacttgaggattgagtgtgaggaagtgttgattgtataatgcaaggaatataaaagacgccgggcgtggtggcacatgcctttaatcccagcacttgggaggcagaggctggtggatttctgagttcaaggccagcctggtctacaaagtgagtgagttgcaggacagccacagctatacagagaaacccagtctcaaaaaaccaaaaaaaaaaaaaaaaaaaaagacatctcccatgcccctttttctcagaaatctactggagaaaagaacccattaagagaagccaagataggaggaacagagacaaggaaactgcttagtgtgggatacagatggggatcctgggaaacatcaaaggggaattctgtgaccataactgtgcattgggttcagatctaactgtccacattggagccttagagctggctaccaggctatagttttaggaagaaagagttctataattctagcactcatggatttgaggtgtaagaagataacaaatttgaagctagtcttagctaatagcaagttctcaggctagtttaagctatatggggaaaatcctgtctcaaaaacaaaacaagacaattcaaaagaaagccaaatcagaaaaaggaaataaaagatataaactaaaaccaggcgaagttaaaacagctttacatcttgcaatagaatacattgagaggaaagtttgaatgtgccgatgaattgacagtaggtacgtagaataataatgaggcataaaaatgttataaagtatgaagagagcaaaattatatgaaaagagaaatctttgggttcagcagtgaattttatttagatgttgtaataatgtctaaatattaaaaagcagagacaattgattcaatcataaattatgatggggagattgtaggtgaggagatttgacagctaaaaccattatttcttataactggtgtcagtagatacctttaaggaatgattaactgttgtacagatggtgaaaactccagaagcagtagctaaacttgagagtgcagcaaagaactctttcttgtgaaacgattaggctatttaaaaatgtgtacctgggctagaaagatacctcaatggttaagagcacttgttcttttagaggtccagggttcaattcccatgacccatgttagctcacaaccatctgtaactctatttccagtgacctcttttgatcttcaagggacccagcatgcacatggtgcacatacatacattgaggcaaaatgttcatgcacataaaataaataactaaaaattttaaaaataagttttttaaaatgtgcatgtggaagccggcagtggtggcacacgcctttaatcccagcacttgggaggcagaggcaggcggatttctgagttcaaggccagcctgatctacacagagaaaccctgtttcgaaaacccaaaaccaaaaaaaaagtgcataagaacgtgctgttcttcctgagaacctgtgtttggttcccagcatccacatcagatggcttttaactgtctataactccaattccaggggatctgatgacctcccgctctggcctccttgggcatccacatgcaggtgtacatcacataaataaaaacaacatttttaaatagaattttaagattatgtatgtatctgtctgactaaaaataaaacactttagaaagatcacagaatactgttctgtgcagaatatacactgcaaccatttaatccccgaggattctgagaactcttaaccatccaacgattgtcatcagcagaatgctgaaatctcctaggaggtggagattctaacagccattgtggttaatattatcctcagttctaagtgttcattttgctggagttttaacaaatgaagaattttaagcatattgcagattaaaatatgtatcatttcagcatctcagaaatatttaaatgatttgttttcctgtgtgttctcaagacttctgcatggtgaattaattctttgcagcttttcccttgagtgatgcctcagatggctggaccttttctgaccccttcaagtctttgaaatactgtgcttattactgtctcctaagagtatgcaaaaactgttcccgtaatagcaaggaacaccaccttgcctttcactgtgtaaggttatcaggtgcaattaatggtaaattgagcccacacacatcttagccataacttttttttttaaagttcaaatgatgaagcttgaacaggaaactgaagtaaagtatgttcattttttaattgattcccaccccctcaaaatgtttctatttgaggtagaattagttatgggcattcaacagattgtttcctgtgtgaaaaatgatgatacctgtctcgacagcctaactatgataataaatcaaactaggaaccttgacttgttgatagcaactgtcttttgagtgtgtatatgtaagtattattttaatggttgctattgtttgctttgccttttttgaggcagacaaaatgtaattgacagctgtcaggtttgtcacttaacttttttttgatccttcaagcgagagattttattttatgtaaactgtcagtgacaatgcatagaaatacaataatacagctgtgctacatttagtcttatactcacaattaaggacagaagttaccttcactgaaatttgtagtaattattgaattgctgtttttgtttgtggcttagagaatagaattgaattaaaataagttatttctctctaaaatttcatgctgttttcccttccctacccgttttagaacaaatacattttgcctttgtgataactgctggctagtgttagttgacagaatctagaatcacctggagatgggcctctggccatccttgtgagggagtatcttggttttgttaatcagtgtgggaagacctgcccactgtgggcaataccattccctggctgttactagcaattgtgagttctggattttataaatggagaaaaggggctgagtaccatgaatgaattcgttgttctgttttcagtttagaatgtgatgtggtcagcttctttatgctcctctcaaagtcacttccccaccacgatgaactttgcccttaacttttgagccaatacagtccccttccccttaagttgcttttgtccgagtgttttatcacgaggctggggtggaggaaggacagtaagacggtgtgttgtttgaatgagaatatcccctataggctctgatggttcaatactcggccaccagttggtagcactgtttggacaggtttaggacatgtggccttgctggaagggccttatcactggaggtgggctttgagagtttaaagcctcatcccatttactctctctgcttcctttttgctgtttgagttgtgagcgctcatctgttcttgctgcctagagtcagaagtccctgccatgatggagccatagggaaccataagtttaaataaacccttcttcctgtaagttgtcttggtcatggtttatcacagcaacacaaagaccagtcaattcccaatttgtttttaattactaatccttgatgtttgattttgtttcttgaaataaggatcattcctatagtatctcaagttagccttaaactggagttccttctttttcagcctcccaaatactaggagcacaggtgtccagcttaagtaaatataaatgtataaatataatacatttctgggagtggagagttggtttgtggttaagagcacttgctgcagcttttccagaggatccaagttctgttctcagtgcccttttgaggcagctcacactacttataattctttccttgggacccagtattctctctgacctctgctggctcctgcacagatgtagatacactgatacagacacacagacatgcagacatgcagacactcatatattaggagagtgatataagtatcctaaggaaaacttgtaggaagtagtttatccattatgtggatgctgaggactgacaagtacctgtaatcacttagccatgctggctctattctagtctcccttctccttcccttcctctcttgaacagggtcttactgtatagccctggctagcctggaacttttctatgtgtagaccaggttgtctcaaagagatctgccttctaaatggtgggattacagattgttccatcatgcctgacagttctctttttccaattattttatacctttcttggatgttttagtgagtagggaaaagataccattgttgtcctatttacagcctttgttagtattcaaaaaggaaatacctatatcaagctggcttagaacttagatccccctctctgtctcccacttgatgctgtttcagttgttggccattgtgctcagcagtttgttcccaacgtctgggttacagctttgtatgcctctgtaaagcataagcatttgggcattgatttgaatgatttaccactgtgcactccacctccgttcattctttcactgtccaaatagttgataacaaactctggttctagatacagaaaataaaatggtcgcaggccctagttctagaacagttatcagccctggaacacctttgtctaggcaaggaattgccatatggctagaaaagccagtgcagcaggataattgtgtacatgaatatctgagaaatggccagaagagagagacagtaaaacagtttcaatctgctaggacaagctggtgaagctggacctgaaggtgggaacagtggaaggactgtttatctttgactggccatctgtgttgcatcagagtacttcactcgttggtcacttttgggggctgttctgctacctgaaaggaccctctagtgcagtggttctctcaatctgtgggttgtggcccctttgggagggaagggtagtcaaatgaatcctgtgcaagggtcatctaagaccattggaaaacacagatatttacgctacagttcataacagtggcagaattacagttatgaagtagcaaagtgattttatggtgtgtgtgtatgtgggtcactacaacatgaggaactctgaaagggtcacaaccagtgagaaccactggtctaatgtgttagccgagaaagagggtatttataatgagtggtatgggaaggtagggaggcagtgcagccactgtgtggtgttatttgatatgagggcagacaatccaacagttaaggaatagaggatttaatgaatttaagcttgcaggtgtgtgtccatcctggcatttcctgtcagagacaggacttccataagtaacagtgtggtttttggttcccctttctgttgctttaaaatgggaggttcagattagatctccatgttcttagaaggtggggggaagtagatgaaataaattgtgaacacagaattaatgaaggtaagtagatttctgttgtgtggcttcacctagtatggttgtgcagatggaattcctgatggcttaaatgagaagtgcaagctttagcatctgatgagactgccagcttgctgtatagaaggaaagactaagaggtaagccacaggaagagagcaactgtccttgaattccagagttagtatagagcagtacttgatgatgtgactggttttgaggtggggtgtctgtctggctttaatataattaatgggtttttccccagaaggtgggcacgttactctctttgccatccacagtctgtgcttctattattattaagtgagaattattaagtgcttattgatattgttgaacagtaagctaaagcgagatgtggtcctgcatagtgtaagcttgatcctggctcttttataattaatgtcacatggaaatccataaacttatacataccacttttaaagtttctttgctattaactagttaaactttgtttaaaataggatggtaaatgggctggcatttaagcaaaccatatgaagaggctaaatacaaattttaatattgtaaatttggtttcagatactaatattttacattttacttttttctctaagcaaatggttatgagccttagagtttctgaactccaagtactgttgggctacgctgggaggaacaagcacggacgcaaacacgaacttcttacaaaagccctgcatttgttaaaggctggctgtagtcctgctgtacaaatgaaaattaaagaactctacaggaggcggttccctcagaaaattatgacgcctgcggacttgtctatccccaacgtacattcaagtcctatgcctccgactctttctccatccaccattccacagctcacttatgatggccaccctgcatcatccccactactccctgtttctcttctgggacccaaacatgaactggaactcccacatctcacgtcagcgctgcacccagtccacccggacataaagctgcagaagctaccattctatgacctgttggatgaactgatcaagcccaccagtctaggtaagagtgatgtggaactgtttggccatgctgtgcttagcggttttcttagactttaagtttgactcggtttatgtttggtagtagtgtcaggatgttaacgagaatcttttgagtttagattaagtcaaatatataagagctgttatttagacaaaagtaaagaggtggggtggttaccaatggggtcagacacaataaatacaaagtttgaaacaaagtttcactgtataaactctggctatcctcctgtatctttcagtatataccaggctgtcctttaacccacaaagatcttcctgcctctgccttctgagctatttgtcccaccatacctggctcctaactaatgtacagtaacccttatgaaaacaaattaccaacagtctctaaattctgctcttaattttcagcggtaaaacagactgactagtgtggattacttgaatgtgtaaatagttttaattatcatgagaggaaatttaagctttggtgttgtggttagctttcagctgctgtttttaagtggagacatgtgttttaagcatacacatgtgacataacacgaattcatattcatagataaaatgagtgctagaagttctgttactaggttaggatcctgtcctgagatttccttatcaagatacggagtttaacatattaaccatttttaattgctatgatgtcatcttgctttactaatgtgaaataaaactgactttgttgtgatttttgatgcctttggtataatatgctttaacagcagacttttttggttgctgcttgttagaaatcggtgtttgggcaggctgtggtggcgcacgcctttagtcccagcacttggggaggcagagacaggtggatttctgagttccaggactgnnnnnnnnnnnnnnnnnnnnnnnnnnnnnnnnnnnnnnnnnnnnnnnnnnnnnnnnnnnnnnnnnnnnnnnnnnnnnnnnnnnnnnnnnnnnnnnnnnnnnnnnnnnnnnnnnnnnnnnnnnnnnnnnnnnnnnnnnnnnnnnnnnnnnnnnnnnnnnnnnnngagagaaagagagaaaagaaaagaaaagaaaagaaaaaagaaaagaaaagggaaaagaaaagaaagaaattggtgtttggcaaattgtggctgccaatctatctccagtggttcatttttgtgcgatacttatgtaagaacttttgttggtgtttgagagagggtctccctgctttcccttccttggtgctaagattacatgtgggagctactgcctccagctcagacttttttttttaattcttaaaatgtaaacaaagctagtgaatatataaataacagaccatgtgtgccccagagcctaaagtatttcctgtctgcttcttatagaaatgtttcttgattcttgtcattaatattaaacatttcagtttgaggaattgctaagtattaagaaaaagttttgagtacttttagagaaagtggggtgttgtttaggttagggtctaatacatcccaggttggcctggcattccatatgaagcagagtatgaccttgaattcttttttctttttaaagatttatttgttttatttatatgagtacattttagctgtcttcacatatatcattagagctcattacagatggttgtgagccaccatgtggttgctgggaattgaactcaggacctctggaagaacaattaatgctcttaaccaccgagccttctctccagcctaaccttgagttcttgatccttctgttgctacctctccctgaattaggggcatatgccatcagtcttttggagatttttttttgttagattttttttagtttattctttgagaaattcctatgtgtatacaatatattgggtcacatttaccctcttctccttcagctctccttggaccctccttagtatgcccctcctaacttcaggttctttttgtcagtttgtttgtttataatccactaaatctaattagtatttgtgcatggtgtggggccatattttgagagcattactgaaattctatcactgatagaggaagtatttggttttagttactttcacagaatttcccagaataaatgaagatacagaaggtattttcatatatgaattttattattatatttttgtgtgtgtccacttctgcatgcatacgtgacagcttatttacgaggttagagagttggttttctctaccatgcacattctcatgatcaaattaggctagaaggcaaatgcccttacatgctgagccatctttccagcctgacaaacagcatgaatacaccattttattatttttttaaaaattggctttagagctgggtggtgatgacacacgcctttaatcccagcacataggcggcagaggcagacgggtctcttgagttcgacaccagcctagtttatgaccatgttccaggatagccagggctacacagagaaattctctgtccagcaaaaattaaccaaacaaaaaatatttttagatttattttattgtatgtgtttaattgttttgcctgttcatgggtgcctagtattgtggggggtcagaagaagccattagatccccattaggaactggagttactggttatgaggttccttgtgggcgctgagaattgaacccaggtcctctgtaaaagcagccagtgctcttaactgctgaaccatctctacaactccattttattatttttaaaatttatttaattttattttgtatgcattaatgagagggtgtcagatctcctggaactggagttacagacagttgtgagctgctatgtggttgctgggaatttaactcaggtcctctggaagaccagccagcgctcttaagtgctaagccacctctccagcccttgattccccgttatccttaaaatgactgaaacaagaaagaatctacctaatgcatataaagcttatgtatgttcattggaaaatacagtttgtatctagggagccacatggacaaggagaacattgactcccaagagttgtcctttgacccccacatgtatgtgctacccgcatctcataaataaagaattaaaaaaaaatatcaacagtgaatctataacagagcatgtgtgcctgcataccctaaagtatttgctgtctagctgttttaggagaaagcttgtagattcttgtcataaatcactgggtatttcagttttgttgattggtgaaacttgagaacacattttgagaatttttggactttttctttaaaaaaacaaaacaaaataaaacaaaaaataaggtctcatgcatcccagacttgaaactccttgtacatagtccttgtacatgcctcagcctcttattccatcactactggcgtgcagcactacagtctgaagttacttagggactctggggggccttttccttttcctctttcccctccccttcccctcccctcccctcccttccatataacacccagaaatgttgtctagtggtctgagtgtgagaagtattcatgtaagccgtgatgtaactggctcccacctttgatcctagcccttgggtggcagagacaagtaccagaagggagggggggggcctgtctccaaaaacaacaagtgtgtaagttaatacaagtgttagagagctttgctcaggcaaagctcagtgggattgtcagctatgagttatggttgatgaatttccagagagaaacacatagtacacaaaacattagcacagcttatgtgctcattagttgatataaaatttgagagcagagagccaaaatcccttccactagtactagactggttcattgcttgagtgactttacagaggaaaactgctgcacataaccatatttgactacatgtataatttgattcagataccaatgacggactccattgtgtgtgttttcacataaaaatacaaaagtagtgtgttgctatattttcgatttctcgtttctagcatagaattaaaggcaaacattttgattctgaatcaaaagtagtccgtggaagcttgattcagtaaacatttgttgtatgcggctgctttaattcatctgaaaaggatttgttgagggagattctgaataaccatgaaaattttaggatgaacaaagttgtagggctgtgtttttctaaatcctttagtgttaataaaaaacagtgtctcactttgtagccctagtagaccttgaacttgctatgtagtccatactggcctcgaactcttaaaaatccaccggggattaaaggcatgtgctattatgcctggcaaagacaatttgttttgattaaattaagtggctctgttcataccgaatttgctttcctaaatgattttttccagaaaagctcatttgttttgatcttagaaaaatcatgtattttgagaaattaaatagttgtttttttaatgcaaacattaaaattaagcccttaaacagcttatagttggttagcttatcacagctgtcacttgagttcagaatgtgacagtaaattcagttattctttcctccttgtatttggccataagcattgatctgagtacaatttaagaatacccagtctggatgttgtgacatgtgtttataatcctaaacctccacaaacacaatacgtaaaagcacacataaaaatatttggcttatgctttagttacggtttccattgcagtgaaaagacaccttgaccaaggcaactcttgtaaagaacagtatttaattagggctagcttacaggttcagaggttcagtccattatcatcatggcaggaagcatggcagcatccaggcatacacagttctgaggaaggagctaagagttctatatcttcttctgaagggaaccaggagaagactgtcttccaggaagctaggaggaaggtctcaaagtccacttgccacattgacagtgcttcctccaacaatggcatctgcactccatcaaggcaacacctcctaatagcgccactccctgggccaggcgtattcaaaccaccacagttgtagtacaactggaattaatcaatcacttgacagtctccttatgtagtctatacttgaaattgggctcctccttctgccttgtaagttctgaaatctagggtctatgtcagcaggcttgagtttcctgctacaggagttctgaagatcctagccaatgagatggctgataagacagttattaagctgtgtttgtattgacaccagttcttatgtagcacagtctagcctcccaaattccctgtgcagtagaggttagccttgagctcctgatcctcctgcttccttggattataggcatgcattactgtgctctgttttatacaaaaccccaacctttatgcattctaggcaaacagtctgtcaactgagctacttctgccccattgtgggcttaaagtcttatttagaagctagattagtgtcccctttaaatttttcattatttctgggtagtggtggtggagcatgcctttaatcttagcactcgggaggcagagtcaaggagaactctgagtttgagcccagcctggtctatagagtgagttctaagataaccaaagctatactcagagaaccctctcaaaaaaacaaaataataataataatatacataaataaattattattactactactactactactactactattgagagctttgggacccccgggactggaataacaggtggttgtgagccaccatgtgagtgcagggaatcaaacctggggcctctgcaagagcagccagtgctcttgactgcttgagccagtgcaagcaccctcttttcttttccccctctttatgtggtattaagctcagggccctcatgcatgtgaggaaggtgactgccagtgaattggtctgcagcaggctttttcttttatttaaaaggagtattttcatacagatatttgcaactgtttcagacttttgaaggtatatgaatcattcatataaaatcttctgggggaagaaaaaaaaagaatattagccaggccttgcagcacatacctttaatcccagcacttgggaggcagaggcaggcagatctctgagtttgaggccagcctggtctacagagtgtgttctaggcagccagacttatacagagaaactctgtctcaaacaaacaaacaaaatttctttgtgtaggttgtataaaaacatacattcatatatacacttggagtttgctttagggaaatgaaggcagcaaatgctcgccatcgcctcaggagctaaggtgagccatcctattgggatttgtgccaggcaggcgagcgagtgaggctcctgctgtatcttatgatatcagctactggtgtttctgccaaggagtgctgacatcggattgtatttgacagtttccttctcattttgaatacttgagttttcctttttctacatgcctaatagccagcgcctagggatcaagcagtgtatttgtggacataggctctgagcagcgatggaaagacattggagtggggagtgtgaaccctcaggctctgcccaagctatgctagaagatgagggagtggggagtagtgttctctctaggttggtttcctcactagaatctgcttccttgtttggtagcactgatcttgaggatagaactccagagtctaccttgcacacccatgctttgtcatctgctgcttctgacttcatgtttagtggtatttatacagttgtcttggagcctgaggctgtagtcactgaatatctgtgtgcttgggtgtaatcttgggcactatagtagactttcttagttagaaaggattttgacaggcagtaaggagctcccttctatagttgtaagtatgaaataacgcctgttaaattgagagctcagagctgaggagatggctcagcagttagagcattgactactctttcagaggagtagggtttgatttctggtacccatatggcatctcacagttgtgtttaacttcagaccctggagattcagtagtctcttctggtcttcacaggtaccaggtatgcacagacatacatgcagccaaaacacccttacgtataaaatgcaaataaaaaatcccgacatatctagaacttcatgctgtacatgatggtgcaaacttgtaattctgatattcaggaggcacaggagaataaagaatctaaggatattctcagctatatagtgaatttaaatcagactgggctatatgagaccctggcttattaaacaaacaaacaaaaataaaaaaaaatcagtcactgaatatattaatcataatactgaactattcttgcatttgtggaggaggagccctcaattatggtataaaatccttttcatcttattaaattgaagtgtgaacattatttcttatggaaagcatcttggttgattggtggattgattttggcttttcagcccaagttagtctggaactcaactcaacctaatttgatcctaaactcatagcaattcttctgccatagcatcctgaatacaaaggtgttaggcatgagtcacctcattgagttggataacattatttcacaatgtagccaagggcagccttggactctttcttacacctccttctctgtagttctgagtgccaggattacaggtgtatccctgaaacctggcctacaatttattcttttccactgatctctttgaggcgtcatgtgctatgtagttgtgttttgctttcttagccagtatctattgtagacccatcaggcttttatgttgttatgtatttgagactattcttgatgcttctgagtgctgagaatgagagtactggagcagctgactttcactaacatgggatcattatatgtagtttttgttattaaaaatacttgaagccaggcagtggtggcacacacctttaaccccagcacttgggaggcagaggcaggtggatttctgaattcgaggccagcctggtctacagactgagttccaggacagccagggctacacagagaaaccctgtctcagaaaaaaaccaaaaaacaaaaacaaaaaaaaaattgataatatatttctttggtacagaagctgactttttaaagtgtcagggtttatattacagtgtttcatacacatttttctgttcaattttgaccctccaaaatctaaaaggggacaaggttctccagaccctgatctccacctgtgacgctctcagttccttatgtagcttctcagagacagttcctgcatgtgaaaatgtttgtcttattctttttcagtgactacttcacaattgagtgtctgggtgatagggtttttggagtttttttgttgttgttatttttgttgttgttgttctgattttttggttttttgagacagggtttctctgtgtagccctggctgtcctggaacactctgtagaccaggctggcctcgaactcagaaatccacctgcctctgcctcccgagtgctgggattaaaggcgtgcgccaccacgcccagcttgatattttttgttgtctgacttttcactagtttcttgcagtttaagacaatgttacagagactgttctgtgtgacccacctctggataaataaccataaacatagccaatatttttataagacaattccgagaaatagactatctatttaaaatcttggtagaagtgtctaagtttcctcttagagaaaggtttgtgtgaatgttaatcccgctaattatgtcacagtttttctcctaggctctcagtgatgtcctaggataaaacctgctgctcattcctaattatagctacaaatctataactcttgtagctttaacatgaataggttatcataaagatggagttctttatgtttacatgattgttacttctttttcttatgaattgattgttagatattctttccaattgggttaattttctcccccccccctaaatttagaattaaaaagtttagagtttaggtgcatgtagcttagtgggtagagtgcttgcctagcatgtctaatagcccaggttcgatccccaggacagcataaaacaatatggtagcagacatctgttgtcccagaagttcaaggctacctagggctgtattgcatctgcctcaaaaacaaaacaaaacaaggcaagatagaaagcaagaagaaaagttgagctttgggtaatgtaaccacaactaattttttcattcttttttttccccttgtgataaatgatacaaatacgctattgttattgctaagtgctgtttttggtgtgaatgtattatattacttcttgaggctaatttgtgtctagtttttggaaatcgcagatggtagctagtgttaatatggatgcatgtttatttccagatacacacccatgagtgcaacttcgggtcatgtgtgtatgtatgtttgtactttgagaaaatattaggccgttttctgtagtggcagtgttttttcctataatactctggcaggctggaaactaagagtaatgacaatcttgtgctgttgtgggtgcctctgggtctttcccctgcttgtcactgagatttttcagttaataaccctatgtcttctgggataagcattgtccttccatgcgtatacctgtgttcaaatatgttttgttttgttttttagaaattgtatcttaatctaatttataaaactgtttaaactttaacccccattatttccctctatccttgccagcatacttaattattgtcattatttttaaattgaacatgtttaaacagatgtgatgtttaatatctttccatctgtgtcctttgggaaatgtccatggacaccgttcatatttttaattggattttttttcactcttgacttttgagaactttgcttttaaatgtgcatgcgcatgagtacatgcatgcctctgtgtgtgtgtgtgtgtgtgtgtgtgtgtgtgtgtgtgtactgtttggactttttgttttgtgatgtgttgtttcaagcagggtctcactgtatagtccagctttctattccctttccttgcaactatctcagtctctcctgttatagaggtcgttgccaccatacctgggtgttcgttcctttatatcccagtccttagaaaaagaattttcaagtatttacttccaatctataactcatttcccttactcccaaatgatgtttctatacaggtggggagataacagaatgtctttcattaatcagctttcagcagttgattctctcctcttgtgtctccagtgatgaactctggtcataagacttgctcagtgttttagttcagttactattgctgtgatgaaacaactatgaccaagttaacttaaaacagaaagtacttaattgggagcttacttacagtttcagagtgttagtctgtgaacattatggcaagatgcatggtgacaggcaggcaggcaggcaggcaggtggatattgtgctggagccgtggctgatagctcatacatgatcccacaagttgtaggtatgaatatagagagattgggtgtggcttaggcttttgaaacctcagcatccccccttctcccatgacataccttatccaacaaggccatacttcctaagccttcccacatttctgctgagtagggaccaaacattcaaacctagagtgaaggccattctcattcaaactcacatggtcaacaacgactttccctgctgagccatctcgatgatcctcttctctttgtatctttaagcagtctctaaaagggtcttgatttctagccaggctggctctgaacttagggttcctcctactttaacttctagcattataggcatgtgctgccgtgtttagctcttgccttacttttttagtgtgtgaaagtgtgtgtgtgtgtgtgtgtgtgtgtgtgtgtgtgtgtgtgtgtttgtgtgtgttagttacaacttcatttttttcccttatggttatatgatactctattgtatgaatttattcccttatactttagctaatatgaatattcatgtacatgttttggcctggatattgtctttgttaattttaattttatattactatgataagataccatgaccaagtcaacttataggaaacaaaaacagtttattggagctatggtttcagaaggtatgacatggtactaaaaaggatctgagaattctacgtcttgatttgcaagcagcagaagcagattatgttccacactaggcatagcttgagcatataagacctcaaggcctgtctccatagtgacacacttcctccagcaaggccaacatactccaacaaggccacaccgaccactagtgccactccctatggtccaagcattcacatatatgaggccataactattcaaaccaccacagtgggcatgaacttgctcacactagttctcagtgaattctcttagtcctcagagagaactccattgaaagattatattttcctaagatacagatttcagaattataaaccaatatttaaccaatagccagaatcatcagttgtgaatataaagtcagtactaggcaaatgttaaatgtgtcatatttacatttagtattcagtattgaaagcactttgtgggctcatgaaagacagtgtcttctcctttgaccttgtttaagatggaaggatagtatagaatagatataatttttaaaaacttttttagtttagtatgtgttttcccatacataagtgaaggttaaaggacaactttgtggagttggttttcccattctatctttacataggttccagggtcaggttgctggaattattcagcaagcacctttagttgcagaaccacctaactggcagaggcaggtggatctcttgatcgaggccagcctggtcaacagagtgagttttgctacacagtgaaaccctgtctcccaaaacaaacaaagcaacaaatccacgttcttaattagagaaacatgcttaaggaaaacaacaataagcctaaagccaggcatggcacatagctgtaatcccagatgttcaggaagctgaggttggaaggctagcctgagcaagaccctgtcttaaaataaagtagcatggcggcctggtcagatagctcagtgatagaaccctgttttagcaaacttgaagccctcagctcagtgcctaataccacagaaaaataaaaccaagtaaaaaggtgacattgcaatctgcggtactagcctttgtgttctttgtgggcaggtgctgtactactgacttgtaatcccaaacccttctcctgtctacttttccaacttaaaaaacaagcgtttgttgttgttgttgtttgttttttggttttgttgtggtggttgttgtttcatttggtacagggcctttctttgtaaccctgactaatctgacactcactttgtagtcctaggctggcctcctgtttaagatagtcttcctatcttgttccccaaatgctgggatttcaggtgtgcatctgcaccaggccccaccagccgctgtattcttgctttaaactttttatttattttttttatgtgtgagcgttttgcctgtgtgtgtctatacactgttgtacatgcagtgcccatagaggccaggagatgacatcagatcctctgggactgtagttaggggcagttgtgagccgccacgtgtctggaaattgaaccaagtcatctgtgctcttagccacctaagtgctcttgaccactaaaccatctttccagcccctatatcattgcttgtgaagcttttttaaaaagttggtttttattttatgtgtatcaccatttgcttctttgtagaaatgtgcaccatatgtatgcaggctagatgcacaggccaaaagagagttctctgatcccctggaactgagtcacggcagttgtgagctattgtttgggtgctggtaatcaaagcccaggttttttgtaagaacagtaaatgctcttaaccactgagtcatcttttcatcccccaactactatattcttatacaagtctttgtagaagaaatttattagataccaggcacaatggctctcacctgtaatcccaatacttgggaagtagcgggaagtgggcagcagttgaaagacatcttgtactatgtaggaagtttgaggctgttgggcaatatgaggccatgtctcaaaaaaaggaaaaaaaaaaaaaacaaaactaaacaaaaaaaaaacaaataaaaacaactactagaaaataatagttcaaaactactggaactagttaaagtctacctttgctacctttgcttgggaatagaagctaattctaaaatttacataaccaaaggacaaaggacttgagcagagaaggcccaggcccacaggactgccctccgggtctctgtctgcttctgcctgcctcactgtggcagcactgctcagcctcacagttcactgtctgcagttcttacccagcctctacagggccattcattactgtgtttgtccccgtcgctcccctgcagtggtccttaaccagggctgggagtccagacttcagcctgtcctcctgccacagctcactgcttaccattcatgttgacactatccctgtggctttcctcatagtttttgctgtactccaagacacacatactctattcttctcccttctccttagtcatttcttccttccttctttctgtttatattttgtgatttcatctaatctcaaagctttaaatgataattaaacatgagctctagagtttctttcaagtacttaatttatatcatgattcagttgtgtgtctcaattttaacgtgtctgaaacagaaagagcagaagtaaccctttcccttcccttcttatcattcccttcttcccttctcaccccccctccttccctttatatgaattctaacccatctttttctctctcatttaaagacatcttcattgtttgtagtttttggctttgagtaagcccacccagatcttggtgtgctatatatgtatacagtctctaaggtctatgaccagtctccttcattggttcaaaaaataattgttgtatttgattctttagtcaggtgccaactttattagttaggcaagcctcttggctatataagagttctatctagactattagcacatctcaggacctttgctgctactaccctgatctgaacctccagtctcttccctggatcattcatcttttacctgctttacaacactctcaaatttacaatgagagtaattcttttaaaatgagctaattgtagtattcttctgtttctgcacttgtggttagccttgaatctatttgatcagcccactcaaggctttatgagctgcgtcttgggtttgtttggtttgttcaggagaatgggtctccctgtgcagcccagctggtcttgaactcttgatcttcctgcttcaacgcttccaagtagctagaactgcagagcttatttgtgttacaatcaatgacaattattccttctagaacttggctttaatcacattggtggtctggctaagagctggccatgggtgtttccaaatttggaatgttcttcccatagatatttacacaactgcctccttcatctacttgagatattaatacttaagtaaaatatttatactgaacacacacacacaaaacaatggccatcttttaacatctctgtcaatgtgtaggtaaaggctatggggcagtggttttgctttgtttacttgtcactgatgtatcccagtacctagcatgatatgttatatgtagtagatgctcagtgtttgctgagtgaatatttgtgcaatcttttgtgatctctcttctctgcctttctttcttgggtgttgataccatttttaggctctgtgtggttcccagagtatctggaatccttacagattcaaatccagcaaaaaaaaggaaaactcatatgtcccaacatttgcagcagaaatcctgaggttactattgaattgagttaactaccaagtccagtccttgaccggtcatgggcaagagaatgcagaacactttctggccgagcctttgatcatgtattttaattcggagtctggagacaaagccacaaacaaaatgtctgttgcaataacaggctgctgacaagttccaagaaatgtcagctagcatatgtaccaatgtataaaacgtggttttggatgctgaccccagtgtgtgacttggttgctagtaggagctcttgagtctgcccaagtctcagtggtttagaaactgaatttcattgtgataatgtatgtactccatgcatctccaacaactgatttctctctccagctcaaggttatcttttaaataaaaaaatcagcattaaagtatacatgaatggtaatcaactaagagagaaactgatagttaatacaatagaatagaacaattgctaagctatgtccttaactaagcaaaaggaatgtgtaacactcagttctgaggtcattcagttcacaggagaaagcctacacaacgtcactgacagaagtcaagtcaggcgggaataagtacatagatgggggcctgcaggtcacttccgttgataaagctttttgtagccaagcctgccagagtttaagcactagaagtcacatgatggaagacagaattaacccccataagttgtcctctgacttagacatacacactaggtttgttaaatgtaaaatacacacacacacagaggaagagatggaattttgattagttccattttctctctcactgaatggcacatgaacagctgggatgggatgacatgcatgaggtcatctagaaaccggtaggcggcaagcggagccatgccttgtaatagctctggccaagactcgtccgcccatgtactgtttgcagttgtccttcatatgaaatgctgacaatgaggaatggagtcatttgttacaaaaatctctccttggtttatttactaagtataatagcaattaaaaaaaagtctccataaaatttttagtccatcacaaaatctgaatgatttcttcatgagtataatttttttcttgaaataggtatacatctggaaatattttttcttttaatttttaaaagagatttatttatttattttatgtgagtacactgtaactgtatagatggttgtgagcgttcatgtggttgttgggaattgaattttaggacctctgcttgctctggacaattctgcttgctccggtccaaaagatttatttattattacacaagtacagtgtacttattatttattatataagtacttattattatataagtacactgtaactgtcttcagatgcaccagaagagggcgtcagatctcattacggatggttgtgagccactatgcggttgctgggatttgaactcaggtcctctagaagagcaaccagtgttcttaactgctaagcccatcttcaggtctctaaaatcagtgtatttctgatagcagtttggcaatctgtataaaagctttacacatatacatatcttgggatttacaattttattatttgtatgtaatgtaaatatgtgaggacaggagtgtgtcactgtatgtgtgtagagatcagaggacaacatctgaagttggtggaactcaggctataagtaattttacctgatgagtcatcttatcaaccttgaagaaagaaacagtttctcatgtagcccagactgacctcaaatttgctatgtagctgaacatgaccttgaactgatcttgtatcctcctttttgctggcttggcactgtgttctttgcttttctgtggcttttgtattaacaacaagttaattaagtaactttctataaaagtgagaaagtttacacttagttgcagtctatttcccttttctgttttcttcaaatctcatcatttagcttggttcctagctgcctggttcagcttgatagccaggtgtgagagtacacaggccagataaggatctttttatatgtttagcaccagggttgccttggagcctggagaatctatttggtgtatctgctcgagggccagctactaactctcaggcctaatctgagaaataagatcaagggtaaataaatggagcaggcagagctgtgctctggaggaaaatgatgaaaagtgtaagctaacgggggtggggtgacagggacctgcagttaggatgggagtgaaatggatgcctttggtacatcatcagtctagtaatgtcatccaatgcagccgcagcctattctattactgagttctgtgggaaagagaaaggatggaactttgttcatgcgcccaagaatcgagctgcttttattatcaaagacttttacagcattagcagtatgatgccaagactttacagataatatacacaataacatgttagtgttggacaaggcatacaaaattatacaagtaatcatattcaacatgaagtttcaaatatcgaagttataagaaatatgattttgatgcttgctttgatcttttaattcatgataagtatatttgcttcaatttatatagaatgttttgggtatttttcttcacttccccccacccccgaaacagggtttctttgtgtagccttggctatccctagaaccagctctgtagattaggctggcctccaactcaaagatctgcctcctgaattctgggattaaaggcatgcaccatcactgactggaaaacttaaaagttttaaacctaatcatttttatttatatagatattttatgcattttagtattttgcctgcttgtatgtctgtgtaccttgtgcgtgcctctggaccatgtgcagtgcctgtggaggtcagaagagggaatcagatcccttggaactggagttccaggtggttgtaaatcactatgtgggtactaggaaactaacccagttctccttgcaagagtagcctgtgcttgtaatggctgaacaatctctagccttcgtgtaatattttatggctctgttcacatgtcattaaatattatcttatagaaaatttccattttaaagatgaatgtagcactgggaatgtgatccagttggtagagtgtgcttgtctatagtgcaagaatctctcaactcaatcctagtactgcatagagcaggcctagtgttagccacttttaatcctagcactgaggatataaagtcaggaggaccaaaagttcagtcttctactacatcgtgagtttattaaggccagcttgggctacctgagaacttaccaaaaaaagataagcagcagatggtcagagcaatgcaaatttgatagtggatcagtatatatcttctttttggagaaacatacattcctgtcatcttccactactgttttttttaagacagacttgctgtttcgtcctggctaacctagaacatgcaggctatgaccatttaattaatcctcctgtctcagcctcctgagtggaaattacagacatgtacaaccacaaccagcctgtaattttctgttttaaagatagttgggagcatgctgaagctatagcgttgcagttgtttttaaagattgcatagttaatcaaatttgggattgagtaaaccagagttcattaaagccagaggggttgacatttagagatagctactttagttccacttcccccaagacagcaagaaatactctgtaactgaaagatgattatttttagctttccgttgggcagtaaggcagagtggcaaaagtgcagtcattagctgagctctgtgttctgtatcaggcctcacaagccttgcttttgtatgcctaggatttggcttccggtgtcctaagtttgtatacacaatgtggttcctctttttttctttttgatttagttcatatttttgtggaataatttgtaaaaactttaaagagtggactttctataactccttctctgtgtattctgtatgtctaggtcttgtttgtctttcctagagataggcctttggcagcttaaacttactaaggaagagtgttgaaaagtcatctcccctaagggccataagtactccctgcaaacatcatcagcccttagtgatgcacaccaccagaatatgaaaccatcaaggtttcaaaatgacacagaagatgtgttgggaattttcatgccttctatttacacttgagagccgagagcaagttatataacattacagatcactgagtggctattgcactaactgagggacagttctcctataccccacataaccagtatttgaattcctttcttagcaaagattcaaaatattgtgcatatagaactttaagaattcagaattgatgacagttacttaaaacactggtgatttagcttcaaacccgagaccttaatgttacttcctgtttcatttaggaaagcaaagatctcctattcgtgtattgaaatcaatgcctttaataagttattctttacctaaacttgttgtagtctggcctctatatctacatgctgttatagactgtgacaagtttaggcatgatttgttaaatatatgaataaataaaaagttaaataatggggtttgttgtgatattctcatacatacatgcccaggttgttagtttgatggcaaatgcctttactcactgagccattttggtaccggccactttttgacctttcatttttattgtagcactatctcgattttggtttgcatttcgcagttaagactgttgaacatcttttaacagattttgagctacctatgtccttgccttatttaagatcttttttgctcagtaatttttaaaagatagcctcattttattttaagaacctaagttcttaatttttttaaagtccaattcattagtggtcatctggcctcttaagtgttcactttgattttgccatttttaagtgaaatacttaagttcaactctgtgatattagcaaatggactttaatgttattttctatttcatttagaaaaataaagctctcctatttgtgtaaagaaatcagtctttaataaatcattctttacctaaccctgttacagtctgacttgtgtatttccatagcagatctcctcaacagtaacagtatggtagttccctccgtactgctttctcccctgctaggtctagtcaacgcctagtttattttgtatctctaagaatttgcctagtttaggcatcttttacaggtagaatcgtacactgtctttttatatccagtttatttcactgggcataatgatctatatttgtccacattgtacaatctatcagaattccattctattgcattttatgcaaaataatatccacatcacattttctccattcttcttctgttcgctgacaggttatttcacctttcatttgtagatacattttatgagcatttctgtatatgcaagaatccttttggtccacacacccagaagtaggattactggtctctatggtaattttgtgtcaccaaactattctatagtggatatgcggcagcacttattttacattcctaccaccaatgtacacaaattccagcttgctggataatttgtggtggtaatttttttgtggtggtgtttgttgttgagggtgatgtttctttaggagagactttttggtttggtttggtttggtttggtttggtttggtttggtttggtttagtttggtttaatatagctaataggttaaaggttgcctcactgagattttggttggcatttcctaaatgaataacaacactgaacatctttttgtgtgttcactggcctttttgtattacttggagaagtatctgttttaggacaatgtnnnnnnnnnnnnnnnnnnnnccctccccctctatggagttgttccttgttactaccatataccttcttttttcagatggctttcagtggcctggagctctctggatagactagactggctctcctgagagcctcaggagactcctgcatccaccttccaagtgctaggtttaaactgaaactcagaagcgtcctcacctttgcatgaccagcacttcactgacagagccaacaccctagtcatttatattgggttgtcattgtgtagcagtttgttgatttgtttttttcaggacaaagtcctgttgtggagtccagactgaccttgcctttacactcttccacctcagcctaccaagactgtggcagtgggggctgttgtgcccagctatggaactttacatatgttggatatttgcacttacccagtcagtatgtctttacaagagtctcactgagtctgtgggttgtctttttattcctttgataatgtactttgtttaacatctgaaaggttaatttttttaaactagaatttcactttatttttcttttgcctgcgtttttatgtcatttaagaagctattgtccagcttaaagtcatgaagattaattaattccctgttttcttctaaagttttaatttgtaaatttagttttccacttattttgaataaagttttatagacagtgcagctaaagatccatctccatcccgtcgccattgaatgcctaactgacccacacagcccccattgttgaaaagatcctttcccttaggaagcatcttgccatattgtcaaaccatggccttagatgcctggttttatttctggctcccagtttgcttccattgatgtgcatgtccctgcagtctttgtttagaactgagtatgttgagtattatgtggcatgctaagactgggaaatcagaatctctttgggaactacctttgttgcttgttactgagtacagctgtccgttggtacagggacattttcatagtagttttgcagttatactgagcttggtctgtgaagtttacattccgttatgtctgtgttttgcctataggctatcaaagatttcctataggaatttttttttaagatatctctctctctccccccccctccccctccctctccctctcctttttttttttaaattagttaattagttggtttgggctttttcagcatactatttggctcagagtggccttgaatttgtaatcctcctgctgagggcagacttttcagcacaaggcttatccttttgtttttatttgtgtttttgtatataaattataactgcctctttttaaactgtctgataatatctgcaagtcttataatatcccttaaattggcttatctgatgttattgatgtgtgacttttttgtttgattttttttaagatttatttgctgttatatgtaagtacactgtagctgtcttcagacacaccagaagagggcatcagatctcattacggatggttgtgagccaccatatggttgctgggatttgaactcaggaccctcagaaaaatagtcagtgctcttaattgctgagccatttctccagcccccttggttttgtttttgctttttgtttttttgttttgttttgtttttaagacggggtttctcggtaattttggctatcctggaactcactctgtagagcaagctggcctcaaactcagagacctgtctgcctctgcctcctaagtgctacatagccctggctggtctgggacttactgtgtagactaggctagcctaatcttacagaactctgcctgccttgcctcctgagtacctggattaaaggcattgctaccacagctggcccagtgtggttgtttcttaatctaccctcttggtgttcatttttcttttgttttttattgctctttagttatttattattcttctcttcctcctgttttccccgctaaaacatgtttttttatgtctcttgctcttcctgcccccacctccaccccctccctgctagtgggatatatgatgtattgctttgtcaggtattctgagccttgtcacatcatcacagtctatccttgagaagcattggcagtgggtgtggcttccgttcctgcccttctggtcttcatactgttcctaagctctgtttccctgtagctttgaaactttgcattttgctgctgttttagaaaatggtgatctgggctggagaggtggctcagcgggtaagagcactgactgctcttccgaaggtcctgagttcaattcccagcaaccacatggtggctcacaaccacccgtgatgaggtctgacgccctcttctggtgcatctgaagacagctacggtgtacttacatataataaataaataaataaatctttaaaaaaaaaaaaaagaaaatggtgatctatttacagacacagtggttcattctatttctctgttgtttgcttttctggtacccattctttctggacatccagatagtctggtagcatctctgcatacagacttcctttattgtttcattaagcataagggtggaggtgagttcttttacctcttacatatttctggtttgatttgggtttttgttgtgtttgtcttactgagctaagaagtcccggctgatagtttttgttgttattttgtgtttgtttgtttgcttatttatcctttaaaatgctcaccatgctccattctggatgacttgctgccatccgagtgaatactccttcctattgccttgctgagccaccatgtctttccttggccttcttttctttgatcacttttaaggctttcttgctgtccttgtgtttgctcagttccttggtgactgctcctacagccagcccattctcttcagtcctaatgaatatggtttgttgaacacagtttttttttttttaaattgtgtctcctgcttttcatcttatttcttgttatttcttaattgataccattcccagagttgttctctccactcaccagagatgccagtgctctcatccactcctttatccactgcccaatttcacccaggcctcctcctaagctccaggtcagtcagtcgctcttccttcctccctccctccctgnnnnnnnnnnnnnnnnnnnnctccctcccttctttccttcctccctcctttcctgtttttctttatgatttacttttatggggaatcttgtggaagaattgggggaaggattgaaaaagcaaattccacaggaagaccaatagagtcaactaaccttgacccttgggggctcccagagactgaaccaccaaccaaagagcacacatgagctaaactaaggccccttcccccattatatgtagcaggtgtgcagcttgcgtgttcctcagcaactggagcaggggctgttcctgacttcactacctgcctgtggatcctgttcccttaaccaggctgcctttcttggtatcagtgggagagtatatgcctaacctggcagtgactttatgtgccaaggtgggttggtaccttgggagttgggagctcccccttctcagaggagaaggggaatggggggaggagctgtgtgaggggggctgcgattggggtataaaatgaataaaataaatggaaaaaattactttcgttttaattatgtatagatatatttatttgaaagtgggtatatgcatataagtgtaagtacctgcacagggcagcggtgtctgatgctctggagctggagtcacaaacattgtagttgcatgatatggggctgggaaccaaacttagctcctctggaagaacaacaagtgttaactgctgagccatctctccagccccgagattgtgtttctttataactttctctacctaggtaggaagaagctgtagtgaacaactgaggaaggggttttacctggaggcaaagctccttagaggactgcaagtaagaggatgagctcatactaattggccttcgggtacctcagtgaataagagcacagactataagcatgggtttgaatccccagtgtttgcagaaaaaagccaggtgtggctagacctgcctctaatccagcagaggggctggggacaagtggatcccaggaatttctctggccagccagcttcgttgaacttgtgagcagagcttcaggttcagtgaaagccatgtcccaagatggagagcaaatgcaagaagacatgtaacattgtcttctggggtccacatagataaacacacacaccacagcctggtattctgtctagatgactgtgtctttgagccttgttctgaaaaaagaataaatatggagaaacctaatgatgaggtgcttaagcagagaaagctctaggaattaaaaagagcattttcacatcatgttaaaagaacagtggaagctgagcacagacatttctgtctaaaaccccagcactggacagactgaaggaaaaggatccaagtttgggtgcagactgagtctgtcttccctcccaaagcaaccagtggaaaaatagctttaaacaacaacaaagcatggtggctcaaacctttaatcccagcacttgagaggcagagatgaggagaggccgagatgagcagatatccttgagttccggatctggtctacatagtgagttctaggatagccagggctatggagaaaaaaacctgcctcaaaaaagtactttttacaggtttgtatgctaatataaggatcctatggctgctgggaatccaacccaaaagtccttcaagcaccacacccactgcactctgactgcagtccaagaacatacttttaatcatgaaatcatacagctctgaattgaccgggaagtgggagatatgtagatccgagttccagctcttgacttgctacaaacaaatataaaacctttacagcttactcctcactagctgggccttgtagcttttcttcgtggtggtcaggtgggttggagatactagatggtaattgttagtgttcttgtcatggtccatctggagtatcaaagagtgacagatgtcagtgggtaacatcagaggtttgtttctccataaattacctaccgccttagctatgcctcatggtctgtgctctgggatggacataggaagaaatgatggaacttagaacaaatatgctgtgaaagagtgtggtatgatagcctttgaaaggttatgataggttatgaaagtttatgatagtcttttcagtgtcacagactagagtgtgtcaagagaagtggctgatggagaaggtgaaggtgtccatgttttctgatacttgaaaaatggctgctctggataatgagtgctttatggtaccagtgggtggactctctaacactgcagattttaggcctgtgctttatggcaccagtgggtggaatctctagcgttgcagactttcagtcattataggacagaagaagtagccatgttgttttagccagcatcttgtcattctaaatctgcacccatcttgaaacttcacagtagtcatatatttgaaaatgagtctaaatttttgcctagtgaataatacgaatttttgtgtggcagagattattttagcactgttgtagagcagagccaaagatttaaattgggccaggcctgcttggcaaacaatccccatacaagatactctgagaaagaagctagctgctaaggttgatgacagagggcagtatttgccttcctgcatgctcctccttgtttattgataattgccagattgttactgcacttataattgtggtaactttttctggttagcaactgttccttgaagatagattctttaagaaaaagcctcaccccacatatgaagtagaaatgcaaatctagcctttaaaagatgttgcttctgcactgagatgtaattttagacctgtgctcttttctccactgttggttgtgcagattttttgatgaggcatgctgcagttggggtggtttatatgtttcttgcaagtagaacaaacccagttaagcaagagattgaaattagccaaaagttagcttctctgcagtcttaggtagcccacagccaagaattatatgatgacaactcttagtgattctttggtattaaattatcttggaaaagtgcagttttaattttttcccctgaaagacagaccttcatgtagtccaagatagtcttaaactcagtatatagctgagactaaccttgcccttctgagtttccagcttctccctcttgagtactgagggtactgatgtgtgccaccacacccagtgtatgggatacaggagttaactaggaagcaacctaccaacggagtcacattccccagcctgagatttcttaatttacctatttattcaataaatagtagttcagaacttgacactcagacaccgtgtgtgtgtgtgtgtgtgtgtgtgtgtgtatctatgtggaccctagaagacaatgttacatgtcttcttgcatttgctctccatcttgggacatggctttcactgaacctgaagctctgctctcaagttcagtgaagctggctggccagagaaattcctgctctcacgtgccgtgcctatgtctgtgcctgaatgtcttggaatgtctctcagaaagccaatgtatttgttgatctcagcatagttggggaatcccttgtgccacagtgatgcatgcttcttgtctgcttgctgccttccttttccctccccctccatcctttttgttcttcattcttgtgtttcacttatatgttgatcctttgagaagtgaactcatccaagactatgaaaaactgtatatgacgttgtatataaaacatgtatggtgctcaggtgtggtggtgcacaactataatcacagctttcaggctcaggagaattgtgtttgaggttgacctttgctgcatagcatcatggcaaggccctttctcaaaacaaacaagttatttctcaaaataaacagaaggcagtgaaagattaatttactttcaaaaataattgcagtttcacctatgtagattcaaagcaggtacatttgtttcttagctcagaaactctgtatatgaaattagtattattggtatgctattataagagtgtgcatataattagacaacttttggttggtctttgctatgtgttcctctgaatttgagttctgaaatgctgtttctggaattaggcctctctgtgcctttggttttgatatatcactactagaaatttgttaattctcattgcttttgttgtctggtctctaggatatacagttaattaatgatgtggttctggctatgtctgtactgatgacctttaagattattaaaatgtaactcttttcttcagcttcagacaacagccagcgctttcgggaaacctgttttgcatttgccttgacaccacaacaggtgcagcagatcagcagctccatgtaagtcaccttcagtctgacctgcagtttggtgtaagcccagaacctaccctagtaactgtgttcaactttcagcagaggtaccatgcccccgcccccagctctttcccttcctccctcccacctccctctccccaccacccccacgtatgagtactgttgacatttctgatacttaggaatagaatgacatgtcttcatgtatatatttaaaaacaatttttattcttattctattttagggatatttctgggaccaaatgtgacttcacagtgcaggtccaattaaggtacagtgttgactataatatatattcaagttttaaaatagagtgttcctttaaaattaatttaaaaaataatctcctcaacaaatgtattgcagatattgagtgagctacctaggaagagaaagcaccctgagagactctgcttgttgaccatttgggtcttctccttagcggtgctcctggggtagtccggaagctgcatctgatagacacttgaagtatcagcttttgggcggttgtggtcgagtgggcctttgagctagtgcaggaggatctttgtaagttcagctctgctttctctaacagaggcagacaggacagcacagcacagcagtctgcagtctcacacacaaacaccagatactccagcccgccccaccctgtttcacttgtaatttaaaatgccctaatttagaacccacatggaagttctcagaaatgtacagaagcataccaacacacaggcttgcagacacaacttgtcaagttttgtttctaggctctttcattgcttctgagggcatctaagaaatttttttcttttcttcttttttttaataaggttttttttttaatttttatttttattttatgtgtattggtgttttgccttcttgtgtctgtgtgagagtgtcagaagccctggaactgaagttacagacaggtgagctgcatgtggcaggccctggtctgttggaataggagccagtgttcttaaccactgagccactgtccagctctctagcttagtaaaggttagtcagtaggatgagaaggtacaatttttgtagaaatccttgatttttccaaaagattgttcatttaatgtaaaaactaatgtttttgtgtgtttttaaaatagtgttctattttctgcaaaagtagcaccaagctgtggctactcagcatctttggttctttagtagcgaggtagccccttggctcttttgactgactttgtcttgaaggtgaggttttggccctgagatcatgttttcagtatattctactgagaaccagcaagatgtttcaggggccatatcaaaactactgtatgctgtatcttcctctcagatttgtaatgcatatgagcctgtatgcaactctggaaagatctttgataccgatgctttaattgttttgattcaggtttttaaaagtttagtaaactacggaacccttttgaaagttcatgagacctcctcaatcctagacaaaaaactacaggcaactaaggaatcttgagaacgagacaaatagtcttctccagggaagagcacacagttagttatccaatgccaagtgatcagcctcgaagacacatgcatacaaggggcattatatggattgagcatgttgtagttatatatttagaagcacacacacaattgaagagagaggggaggcatatatttaaaagagagtaaggaaaagggggtggtacctaggagggattggcaggagggaaggagaaacatgatgtcattataatttcataaatgtctgaggaagctactcttcctcagaagatagttaaataaattctgaaatcattgtgaacactagtacaggttggtagtcacagcttcttatccagatacttgatggagttatttactgttggccttaagcaactaagctgaggcataaggaataaggaggcaaactcgcaccccttgttgtaaatccatatataacctttttggttgttcaatcaaaagagggtgttgctgcatagccctggctggcctggaactcacagagctccccctacttctattctctgggtgctaggattgaaggtgtggccactaaacccagccacatataactttggactgtcccccaaacctaactatgaatggctgattactgataacctagacagccaattagcacatgttgtgtatgtgatatatttgatgaaaatgaacaagaaccacacgaggacatttttactgtgactgtttatagttttgaaggactgctcgaagaggtgcctgaatccgagcagtggggagtgggcagtcactgcactgcaatcactgctgtagaaatagggtgcaggtttgaagtccttgttctcactctattcactcttacagacactgaaaaataagtgttattcttaattccgtattacttcctgtccccagcacatgctcaaggtctgtctgattgcacagaagcaggaaacatctgtaaagtcccccagcaagcatgtgtggaccacagttctgtgcagttgtcccttaagatctcagctttgtgtttgtttttctgtgactgggaatggcaccaggtgtggttggtctgtgtgcatggagtttaatggatttctaagtagtagatttatacatattttgtggtaacttagagtactattatctacatatattttatgcatttataagctatctaaattcttaatgtttttaacatctagactaactagtttttctttcagtttgtttaagatatcacaaatttatgcacatgtgttcacctttgcatacacacacacacagagacctgtgcaattcagacctctgttcaatggtcaactttgttttaaaagcctgtttacctatgtttattcctcatgtaaaatattctttttcattgtttgttctttttctgttttaaaattgatgatctttcaagttatctatcaagttaaaatgttagaggttatcttttaataagaaataaactcaatctttgccatctaggttttgtttatcagaaaccagttgtccacaagaagatcacttcccacccaacctttgtgtaaaagtgaatacaaaaccttgcagccttccagtaagttctaaaagtcatttctgaattagcatttcttaggtgactattttggggactaaggatgcttggtcaatgatagagtacttgcttagtattggaaagatgctgaattcagctccagtaccacaaggagacattttctatgtgtctgtatgtcattatatgtgacgaggtgaggctcgctgacataggttagcagttttgatatggagagaaaattgtagaattttgagttagccatagtagcatctgtgttacactttgtttgggggatgcatatcatcagtgtctcccagctgaactcctgtgactgtgcctgtgggagagcagggtttgagatgctgccctgccttatatggggtggggtgggagctgtgtttggtcccctcagaaatgtttcttgtatacctctttaagacattataaacacagggctggtgagatggctcagtgggtaagagtacccgactgctcttccaaaggtccagtgttcaaatcccagcaaccacatggtggctcacaaccatccgtaacaagatctgacgccctcttctggtgtgtctgaagacagctacagtgtacttacatataataaataaataaatctttaaaaaaaaaagacattataaactcactctgattcttaaattaagagagtttgaatttctgtcactgggggaaggggaggggattttcggagggaaaactaggaaaggggataacatttgaaatgtaaataaagaaaatatctaataaaaaaagaatatctatcactggtatttttctccgtcttaattaaacaaggctggtgagttgtttggagagattaggtgactaagtgtttgcttccttactttttaatgatatcatttgtattttctagcctgtactttgtacattgttttgttttgttttgtttaagaaatgggaacaattgtggaatagcagaacttaattttattttttccttagggttaccttccacctactaaaaacggtgtggaaccaaagcgacctagccgaccaattaatatcacctcacttgtccgattgtccacgacagtaccaaataccattgttgtttcttggactgcagaaattggaagagtaagtaagcttttgtttgtagttatttcctgtcataaagaagggttaatcactatggcttgcctgggtttatatgtgacttatactgtaaatgagttgaaaaggatttttgtcccatggtgaatctttatgctattcctattgatcctcgtagtatcataaacttcttcctatgtcattatatattcttttgtagctttttaaatgattatatcatatggtgataagaatataccactatttagcctgttctcggatgttgagtatagttttgaatactgtcctgccagctgtagctttgcatagatgaatgatgatttccttacagtaaattctcagaagtagagtttttgagccaaagagcaagaaggattttgagaaattttgtgtgcattgacagatggctttccccaaagatgtacaaatgtgttctctgatttatagtgtttatttgcatgcgaacactgttatcttttaaaaattcttcagcattaagtaaatgttagcatgtagtaccccttttgtttttgagaagagtaggcatatttggtgtttataactatttacattttaaatttgtacctgtgttcctttttcttttgttcttttcttagttttcttactaggcttaatctattgagaattcactctttgttaaatcttacaaatatttgtctccagtttgtatgctttttataaatgtgattacttatatgtagaattaaatttttatagtaccaaatactaaccagctttttgctttgtagtcttctccccttcccataatgctcagtctttgcatgcttcccacggttggaaatagtagctcctagactaggaagaatgctccttgtgtatctttagatagttagtgcatctggaattcatgttgtttgagaatattttttcacttgttagggaacccaattctaatatcgctaagtaaatgaagtaaatggtagttattgttacataattttttatattctgctcctttttatgagctttctctatactgtttcttagtctagcattcattttctagaataatcttttaaatttttatttaaaaattattgtacctttttagtgttaaccctcctatccataaattaatatatatcaactatgtgttatatactgcataatactattgtagggaaaacaaatttttattttcccagggcctgagatctggaggcttcatacacacacacaaagaaatgtccatttgtttaagtgctgtaagatagaagtgcctggtgatcttagtgtatctcccctttcaagtacttgaaagaggagagagagaggtcagggaagggattcaccaaggaagcagtgactgagaggaaaactgggagaaagatagggaaatgctcagaggaaatacagcatcccagagacagggatccttgtctttcccaagcaactgaaagggcttcactgtgaccgaagagtagtaagggaaacagcatcagggacctttctggagagtaagacgagcctcaaccatgaaaggctttgtaggaaatgtcaaaggtaagcattttctcttcatatgcagaaagtttacatgtttccatttaaagcaaggtcactccttagagtggctaagtagttgggatagttgccaaaatcatacagtagtcacctgttcggagccaattattacagaaacattcataggagcattagtgattaggaacaatacccattgtcagtgtcttgcctccacatgcacatacaaatgaacttacagacacatataactgaatggagagcacacaggtgacattagcaagaagtgttcagttgtgatgggctggaggtaagctagagggttgtgaattacaagactatcactcggaagaagatgagatgaaggggctgactgtgagattggcggttctttgtcttaaagggagaatctgtaatgtgtctgggtggtggcaggactcttctagaaggaggaggatagtcagtagtgaattgcatccttgaaggagctcatagtagctaggacagacagcttcctcagtaggacagtaaaatgattggaggggctagagagatagataagttctggttttgtgatttctctcacatctgtctggtaggaactgagataagctgagagagaagttacagagagggacttggagacaagtggtgaaggtgttagcatgagacactgtaaagcttcccttcacattatttcaccacatatgaactgtggaatttcttaaccacacaccttccacactttgcttctaggtctttctcagactcagtaagatttcttgagagtcacagatgagtagggcaactggaggattttaatagtaatctgtagtgttttcagtcccaggagccatagttgtccgtttgctcagattctcctcgacgctgctcagtgagtgcataggtgggatagttgtcctgcatccgtaattcctctggtgcttttatcattgctatttccagtgtatcttttgttcttttacatttccgagggttattcattgtttacttcttcagaagctactggtttgtggctgtttcctacttaagttcatatgttggttttgttgttgttgatttcttagtttttccaggaaggtagtgtttagtttgagattgtcattttcataaatgataagacatatatatgcctcatttatttcttcttctagctggaacattttaaacataacagatgctaattaaatccttgattgttcctgtgtcaagcagaatattactactattatagtattaagtattagaatgacgtttgtgtgtgtgtgtgtgtatgcaggaacatgtgaatatgtgcacaaacaaaccagtagagggcatcagcatctgcttctgtcactcttggaggtgcctctgaggcaaggtatcctgacctagcctagaagcctagcgaagtcctcagcgattcttctgtcttcaccactagttacaaacctttagaagaaaactctacctataccctggctctcaagtgctcattatctctgagtcccaccatgaggtttttgggttggtttgcttggtcattttgttgttcagctggatctcattatatagttttagctggcctgcaactcatgtagaccaggctatatagaactcacagaaatccagctgcctctgcttcctgggtactgagattaaaagtatgtaccatcatgctcagccctgctattagtttagaacttagttacagtaatgatatatttataagatttctcttttatgaaatttctttattagaaatggattttgagagctaggaatgtaatttagttcagaaattccttatctgccatgcaagaaacccatcctaccccccaccccaccctatcccagtattccataaactgggcatggtgacacatgcctattctccctggagtcagaaggtaggagtacaaagatcagaaatgcaatgtcatctttgcatttctgcaataaaaaacataacaaaaggtgctttgtttttttggttggttggtatgtggggtgtgtatgtgtgtaatatcttaccaaggcagtagtagggagaagaggggaggggtactataatgatttttatatagcactagaggaaaaggggacaactctcccactgggagtcttctagacaacagagatagaagatctgtagcctaaatgcctgttttggttttagttttggagacagagtttttctgtgtagtgctggaattaaaggcaagtgccaccactgcctggcttagaggccttttttaaaacgtaaaaagagggggcagatagacagatggctcagcagtgaagaacattgactgcttttccagaggtcctgagttcaattcctagcaaccacatcatagctcacaaccgtgtataatgggatctgatgccctcttctggcatgtaggtataatgcagataaagcactcatatacataaaatttaaataaatctttaaaaggtagaaaggaaattatttttgtaaatctcagatgactataattattttaaaatcactagtttaattcagcttgtgaggatactctgaagagtgtgtgcagaatgtctcactctattatagatagatacttgatcacctggcctgggctgcaggggtataattccagctacttaggaggttgaagcacgagaatctcaaaattaaaaccagcccaatcagttctaggctggcctacgtaacttagtgagattatgcctaaaagtacaaagtagaaacaaggctgtaattacctagtagaaggggtgcctaactcacaggaagaagccttgggaaaggaggtttgacctctgggaagaggaggtgaaaaggaggaagagataagtctcttcaaagaaattaagtagactccacacagttcttgaaggagagaagcgtattgtaacttcttgttctactctgtggcactgtatttaacatttattaaacttgcactgtggatggtgaaattatttgaacactactgtaaaagggggacagaggacattgtttggattatggagaaagtatcttacagacttaaacaattttacaaatgttgtaaaagtacagacaaaatgaacaattagagatgacatacaaatagttggggcctaggtggtaccttagggctggctggcagacacactgactagctgctgctggtttggtgtctttgtgtgcagtgtctcctgtgacactggtacaagtggcgcttcactcctagcactcctgcagcatctggtttcctctctggttacatgtttcaactagagcacatgtaccgtttcactgaactcggttttggaagttgtttgtttgtttgtttgtttgtttgtttttatctcatcataaatattaatagaaagtcctgggtgtaattccaaggttgaaggttgaagctgtcagtccagaatctcacaatgttgattagcatctctccagtttctgtttggagtgatggtgaacaaggttagggtttcttcctcaaaaactctttcttctgtattagattagttaataagttgtgtgctttaaatgtagggacaatgtaatcttgtccctcccttgttacagtactgtggaatgtgctctaatgaaagtaagtttgctgtttgcgactcagtttgtttccccacccagaaaacatgagaacttgactggaaatgtagctggagggtgtgtccctttgttactaagtgtaaagacatagaactagtgctgggaaaatagctccatggcacagtgccttcttagtggatgaggcccttgcttcagaccctaactctgggtgggtgggtaggtgggtgggtgggtgggtggatggggaggatgaatggattggaatgttcatggggttaggctaggatgttctaataaactctgatgtgttgaagacttaatggaacttgctcactcagcactgccttctggcgttcttcccctttcctcctggtttctactgcctgggccatcccagcagtcacatgatcataagcatagtgtataatctgtgcctcagtttcatcagcccttcagaatagagcagtatctttttctcccctacagaccttaccaagttgtaaggacatctgtagcatatctcaggagtgcattgtaaacggctgctataaggaagactgctttctcacttcttccaagcgtcttgatctgcttaatcccattgcaccctaaccaaagagatcttcagaccttcccctttcctccctcatagtcttggccttttttctcttcctcttttccagccacgcaccctttactcatcttggcttgctagctgcttctcacaccaccttctcagggagtccttataggcattgggtgtcctgctcatcttcaagcagagcttctctgtgcagccttcactactgttccactgcttgacgtctgcatggcccaagtcaagtatctttaagatctaggaagatgtaggtgtagtgaggcactaagtgcgtagactggaagcccactccatggtgatgtttaatagctactactttttagagtgtgtgttacctattgaatacagtttatgataccttcaacatcttaatggccctggtttatatttagttttaatagtgttctttcatattagagccttaaatctattaccttcaagtacatggtggagtaaagcaaaaggcctgggctggcatcctcagcttggcactatggtgccacagttagggtagtttctttacctttctaccttagtcttctcagccacacacacacacacacacacacacacacacacacacacacacacacacttagtttctaaccacttcggcagcctataaatcaggattcactgaaatacctaggatagtgcttgacacacagtaggtgctacaagaagtgttagttttccttccctgttgctgtgggtttaatagatatgctgtttacttaaatatgtgattggttttctacatcttttttttttccagacctattccatggcagtatatcttgtaaaacagttgtcctcaacagttcttcttcagaggttacgagcaaagggaataaggaatccggatcattctagagctttaagtacgtatgataaacttaattcatatctgtagctaaactatcttgttaaggttagagtagtggtttttttctcaactcaaattctagtgtttcttttggttttgttttgtttaccagagcttgttgttatagaggattacaaactccaagaacctagtattgtgagcttgtaaattaagatctaagggcagttttaatgtctttgccatgaactatatttaatgatctgtgttttacagatcttaatatttactttgtaaggttacttcttgaacacagtattttttttttacagcgtctgaaaaccaatgtttaaggaattttaggagatggaaaggaaatcttggcatgaattccaagaacgttattatggttttcaagaatattttagacccaggaaaaatacacagaattatatgatgactgtccccttgcttttaccaaagtcaaaagtcagtcaagtggcagacatgaatgttaccttgggcacagttcttcatttcttgatgccttcttacccttgtttgtaatgataggtttgtaacacgtgatttttaaagagtattttttgagaatttgatctgtgcaatctcacacacacacacagctcccctctgaatgtttcattttaatgtattaaaatgaaaatgtaagatctaaaagtggacttcctggcttcaagttttgagcatcagtgcttttctaaagaggtgggcttctccagaggtgtgggctccttggaggagaatttggaggtagaggtttggtgcttaggaagcagcgcattgcactcgggagcatgatggactgaccttgattctgtagcttaggccggcttcaaacttgctgtgatcctcctgcttcatgtgctgggcttacaggctgaactgccacaccctgaacctgcatgggaagctcttaagatgacttactaatagcagctcattctcagatttgttgttaatcagatttgttcccacactctggtgggaagaattaagatactaaggccaacttcctcatagctcccctgcaacacagctcctggtctttctccaccgtgtttctgtagcagagtgaccaaactagaagatctcactatctctggcaaacagaacacctgagatagttcactggaggtttttttcagtactgaaaggatccttttttgaaaatgcaaatagctgggtatggcggtacacacctgtatccctagctactcagtgggctgaggcaggaggatcatttgaactaagagtcaaaattggagctaaaatgaaagcatcatttgtgggtctaaggaaatggaggcatcatgagtcggagacaagaaagaaagggtcctgacaagagaagaaggggtagacatctgcctgaagggaatgtgcaagagaggcatccttttttttcaaagcctcgatggagttatccctgactgagtctttattcttgccttgcattactagatcacagctagtcagaaaacatggaattgtgtggtaactgtggtgaaaaagacaaatacacagaagaaggcagatgaagcttttggatttaacaacaaagtaggctgcttgtataggcttttgattcttctacatttgcagctagagtgctctgaaggttctatcaggagggcctgaattggagtttctaggaacctgtccagctaccattacacagcaagactacctaattgccaagctacttacttcgcatctttctgccctgctaatctgagtgagagttttatggaagttctgctttatcatctttattggccaagtgaatgaatagagtattagttagattctaccagtattaaatatatttcaggctgggtgtggtgacaaacatctttaatgccaacactcaagaagcagagacagggacaggcagatctctgtaagtttgaggccagcctggactacagagcaagttccaggacagccagggttacacagaataaatcctgccttgaaaaaacaaagcaaaaagaaatatatttcagttgactaaaggcatttacctctatatcacctgtaaagaaatagcttttccaaaaattatgtaattaaaaaactattttaaaagttattcaaaagggggctggtgaaatggctcagcagttaagagcaccgactactcttccgaaggtccggagttcaaatcccagcaaccacatggtggctcacagccatccataaaaaaaagatctaacgccctcttccggagtgtctgaagacagctacagtgtactcacatataataaataaataaatctaaaaaaatgaaagttatgtaaaaatgaaacttcgcaggaatgtttgaagcatgaactttgcttacagttgttgattataagttattcttaaccttgtaaggaaggtctgctggcagttttgttagtcaagtccatgtgtgataatgttgtttaagtttgttagtatttagaattcagacttttcattgagaaaatatattctgtgggctggagagatgttcagccagtaaaagctcacaaccaagatgtcaaaagtgaagtgagttctgtattttcattcagaaaatgaagaatctgctatgttctaggacagcattacacaagaccacaccttctccatacatcccaaaagtttacaatctaatgggaaagacagacctaagtcactaatgagttacagttttgaaatgtgcttttaagaaggaagacagggaactctgaaaagacaccacagggatctagtcctctactctgctctgcgatacagaggacagtaatagaagttgggagaagaggaaaagctgttcttaagccccaggataggaaggggatatgtccaaggaaacggccaaagaaactagagtatagagaaggaagagaagagccagggtatggtggggagactgtaacttcataggtgctgtaagaggcccatgtaggagaagtccatcagagggttcttcccagaggaacaacactgtcttaacagagtggggcggtctgatcatcagctagaggaggagcaaggagggcaattccaacacctggaagcagttaggaacctctcacttaaagacaaccagtttgttattattgtgtgagagagtgtatgtgtgttagtgtgttggggtggaagtcagagaacagctatgggggtctgttctctcttcccacctttgcatgtgttccagggactgaacactcaggtcaaacagggctgtgcaccaactaccttagcccactgagtacctcactggcctgggttctcagcactgtatactacatcagtgctgttttctgaagaaacggtatttgaaaggtgagactgaaggggctgactgccctctctgaaatgtgctgtttgagatgtgagtgcacaggtgacaatgctcagacacagcactgcaggagctagccacctcactgtcttctactcgaatttctagtccctcttgtctcctcaggtattaactgacagctcttctgacaagtctttctcatactttaaaactctgcttcttgctgggcatggtagcaagtgaccacagtgctgatgtcactgctctggctaagacatttctaccccagatgttctgctgcatttgatatcaacctctttctccttgaaattgtctcctccctcttctggcctcatccacctaccttctgtggactcttagagagaagcttcctaatgttggacatagtagcctttaatcccagcagagggaggcataggtagactgtgagttaagaggccagccagggctaaggagtgagaccctaggagctcaggtgggagtatattgtaaatgttccttggaattccatgctgtcctgccttcacatccactgtttctgcttaaacttgtactaacctccaaatacaaatcttcactcaggtctctcctctagcttcagattccataggctgtcttgacctaaacatggttttgcttatcagaatcaagaatttaagatagaatcctctagatttgccaactgacaacctaaacatttcttaaaatctatcttctaccattgccctcatttgaatccttacattttgtctttatctttagaacctcagtcctaaatgacgtatttaagtatttcttttctttattggcttttcttgtctttttcctggtagcagcctaacttagtggcacacatctaatcctctttcatcctctgaactccgaacaccaatggaataaaatgtccagcttcgttagtgcgacgtataaccctgtccattgcaaaagcacaccatattttttccctccctccctccttccctccctcccgtcccccatcagtgctggagtgttctctctgcctcaaacattctagctgcttctgctgccttgctccaggggtcctctgtttcccagacccccagggtttccagacgcccatcagtgtgggggacctcattaagcatcttttgctcctgctggctcatctcagttctcttggcttcctcactaactaacacggtaccttgacacatagtaaactctcacatttagttgttattgctctagtttgtgacatcatatttgtaatcttctgccgcaacttcccacttgttaagagtgtagatgtgcttctacactcagtggttggtgttaactgataaaaagaaatgtagagtgaaaaccaggcttcaagccttttgttttctggctataatagaacgttaagcttagtatgcttagttgttttcagctttaaaatgctaaaagactgaattaaagtattctgaaattaatgagggagagaagtcaaacagttataacccagaacagcaccatcgagtacagtagtctgaaacagctggacagctgtgtgatgtcaccagcagcagcgtggctagtgaacataaatgtgactagtgtaactaaagcactgagtttcaaattatctgtttcagtttatttagtagagtctcatgactaacactggtagctcataagaacagggactcaatagcaagatgacttttatatatagctagctataactgtgttcatgaagtaggactcagcactgcagaccacagtccagaggactgaccacagttcgtagggcatagttcttagtggggtgcagagctttgcttttcctgcctccttgttatccaactgtttcaacaatgttgctttaaaaggagtattttttccttcatttaatttcttttggctttttatcaaaagctgattgatcataagtatataaacctatttctggacacttctgttggccacattttcaataactacagcttcttagcaagctttgaaaacagtctccctgcttttttggaagggtttttttttttttttttttggagacagggtttctctatgtagccctggctgtcctggaattcactttgtagaccaggctaacctatctccaaagatacagaagaggcaggtggctaaatttcacatctattcctgataaagaaactctcagcaaaatattaatggaacaagaaaggaactgcctcaatattacaaaacatttacaaaaacaaactttagctaatatcataattagtagtaaaaaacttgaatcttctaagactgtgaataacgttagaataccgtgcctagcattaccctagaggtcctaaccagcacaacaaggaaagaaaagataaagatgagggattcagattatttacacagaaaaaagtcccaaggactaactaaagagactgctagaaaaaatgcatgagtcatgatttggaaaatctgtgatcaatatatataactgaattgtatttgttattaatgcattactggacagttttgacattcagacagttatgcatccttagagaagtgacataaaacatgtatagagtatagatgctgaaaactatgagaaacccagcagaagacctgaggtagattgagaagccgtgatggaagttagcagaagactcagcatgattgtatgccagttccccaggttcatctagaggtctagtccagttaagaccctagcagaatttgaaggtatctttaccagggaatgactgagtgcagagctccataggagagcactggcttgcttagcaggcacaaggttcagtccctaattgcaagatctgctttattacaaatttacattaagaatatagtaaagttagtagttttcttcaatttaaaaagaatcccagagccggacgtggtggtgcatttgggaggcagaggcaggtagatttctgaattcgaggccagcctggtctacagagtgagaaaccctgtcttgaaaaaccagggggggttggggggggcggggagaatcccagactttttaacccatgttctaagtagctcagttggtaacaaaattgtttctcaggaaatgtgttcccttctgtcactccttataacagcctatgggaagattatttcactacctctgtaaggctggttgtgttagcatttgccatagtaacttaataaatgagatttctgtgtgacagatgctcttactgcacgcactggttcacacagccttttttctgatattccagtgcagcagctcagctagccattttccttcaagagctgccggatgttccacctgttaacagtggctttcccccgcagcccttgggagtaaagataactgatacgttatgggatacattgaaaccctcagtctggagtagctgagctgctctcacttgatgcagagcctgcactggctcacatgtaaaaaatatattttcataagagtaggatttggtctgttacatatagcaaaggagatttctgtctgtctgcttgttgtaatagaaatccacaaatgtaatttaaaaaaaccttatctccaagagagagggagcatgcaaattattttaagtaagaattgctagcattgattaaatataatattaggtagtttaggggctggtgagatggctcagcagttaagagcaccgactgctcttccaaagggtctgagttcaaatcccagcaaccacatggtggctcacaaccatccgtaatgagatctgatgccttcttctggagtgtctgaagacagctacagtgtacttacaaataataaatgaataaataaaaattaaataaaagagaaagattgttatcaaaaaaaatattaggtagtttaatacattcttcattgggttaaactcatttaatccagtgctgtgagataactgttgttctcatttaccaagttatgaaaaaagttactaaagtgacttgacaagtcagaattctgacttcgtgactcggggaactgttctcttactgcctactcagtgtgacctcctctgtgaccgcggagtttggatttcaaggccgatattatgctgttgctgcattaagcacaagtttgcccaaagctcagacagttactattcccattactgtgtaggcggtgcccgctgggccagttggtaaaggagtgcagggtggatggtgtctcactcaggattctctagagcgagtgagaaccaggagggtaaaaatggaaagactgcgagggaaaaacaatagaggaactgccttacttgattttggaggccgagaagttccacagtgccatctgcaagctggggaagcaggaaagcatggctgagcacaagtctgaaggctcagagaaaccagtgatgatggctgagagccctggggtgctgaggtgaatactaaaacccagaggctacgttccaggatgttttctgttgtgtcctccccacttgccagctcccttacatgttgaggactgctcttctgtccctagttcatgaactcacacgccagtcttcccagacttctcagtcttctcctcagagacacgactacttgttcttactggggagtagggagttgggttttgttattgttaattgggattttgttttgtcttgtgacgggggtcttatactgtagcccaggctatcctggaatttactatagaccagggtgttctggtcttacagcaatcctcctgggtttacaaagtcactttgccctgctaattaagttaatgttctttcaaattattttataatgaaggattagctaaggttggataaataacttcctaatttacatttgttgatattatagtgtcttgatgactttcttttccaaactaaagtccagaggttttatggctttggggatatgaaagttaacctaagaataagaaatacatacagactttgaaaacttcagatttccagtctacaaaataatgtcttaatctggcatcagaatctgtgtggatttatttatttacaatgtttgtttacatgtattcctgtacaccagaagagggcaccagatctcatagatgattgtgagctaccatgtgattgtgggtcctggaagagcagctggtgtgcttaaccactgagccatctctccagcccctatgtggagctttttaaaccacccattcatgtccctcttccccagtctaatgtgatcagttacaaaatagaatgttccagatgtaactcagatgtgcttctatgttgagattccctaatgtgagacaaccattatgtccaaaacttgggccatctaaaaattccaaaccacacggtgtgatcacgtatttcataaaggctgtcttcttagttctgcaagtggcagtcagcacagacatctgcctatcagtttgtgcttcccatgttagcattgtggtcataattattgtgcaacatctctgaaactgtgcttggttatacttacaaccactctacctcaggcccctgtttctaagatttttagaatattttttctggatatttcctgactcagtgtttatgttggttcctgtcatcagaggtagctgctgctgcaggtttacacatgtcttagtcagggatctattgctgtggagagacaccatgactgaggcgactcttactggggacttacttacagtttcagaggcttactccattatcatcatggcagggagcatgtagggcacatgctggagcattacctgagagctaaatcctgatctataggcagagagggagaaagcgagagactgggccttggcttgggtttttgaaacctcaaagcccacccccagtgacacacctcctccaacaaggccacacctccaaatccttctcaaatagtgccagtcccaggcaagggagcattcttactcaaattgccatacatgggaaatataaagaatcttttatagtaaactggaggacaataaaagaatagccatggaaagtaaaaatattagtacctcctttgaagattatagaaagttggagtgagtgtctggtgtgacttctggatttactgtaaataacattagcggaagaggcagactgacttgctaaagaccacaaagtgagtttacaggcaaatgatgagattcagttacatgctaaagaaatacttggactttttcttttataatttgaaagtagagttagtatggttataataaatgttttgttcattttctatctatgcaaacttattttttatcatgttctttattactttcctttaaaataaaagaatgcaaattaatcataattttaaagaaaatcattagtatcttagaatactaactataaagggccagcacgtaagctggaacacagaagctgctgtaggacccacttcctgtgggccatgatgcagtaccagggctttgcaggagctttagctagctacagagtaatgccctccttcccttgctttctgtgaagggcagaagtggttgaactgctcttagctttccagataggtgattggaagataattgtttaggttgtttaggttttaagttttaagcttatttttcagtgttatattagtaattcctttaataaaattgttctacttgttttctctccaatgcatttcagttaaagagaagttaactgcagatccagatagtgagatagctactaccagcctacgggtttcgctgctgtgtccagtaagtgtttgctaatgcttgcctttgggtatatacacttctttttactgagtgtgagaaattctgcttactttaagaatctccccattctacactgtcagagtttatcaaaatggaaagacactggagcataggactgtgagctgaataattgtaaagtgtgccttattcatagtgtgtattatctaagtactgccttcagtaaacaactgtttctcaggttccagttagaaaaatagagtagggagtgctgtggtgtttccatactccattaattcaaacaggacttttctggataaaagttgagcacagttatccacatcacaatttaactaatttgtcaacagtagctataagaatctcccatttaagcctttaatcccagcactcgggaggcagaggcaggcggatttctgagttcgaggccaccctggtctacagagtgagtgccaggacagccagggctacacagagaaaccctgtctcgaaaaaaacaaaaaacaaaaaacaaaaaacaaaaaaagaatcccctattaaaacctgtgccagctgggcatggcacatacctttaatgtgggcagagaagtgaatctgagttcaagacaagcctggtttatggagctccaagataactttgtcttcaggaaaactaaaaacaacaacaaacacaaaacaaagaacgatgccattcctaatactnnnnnnnnnnnnnnnnnnnnttgtggggagagggctgaggcagacagattaccataagttcaaggccagctaagttaccatagcaacgccctgtcttaatttaaaaagaggaggaggagaaaggaaattctgttctacctgactgaattccttatgcctatagaattaactcaatacttgtaagtcagcaagggaaggaacagtcatttaaatgaaacaattataaagtcatcagatttgaccaaatgattaaaactataagcaaagaaattgtgttgaaatttatttcaaaaaaaaaaaaaagaaagaaagaaagaaattaatttcatacctaatttgttggtgggcccaccgagattagggatgacagttgaatattgccttgatatgagagaaggtgaagattaataataaactgctgacattttggttaatcaaattaactgtattcaaatgtataaaaaacaaaaggacacttgtctcctgatttgcctggattgttccagaaggtggtgtcatcaaaagctttcatcatcaagagcctgctaacctaagagggtggcagtttgttgttcttttaagaagtggcgggccaggcgtggtggcgcacgcctttaatcccagcacttgggaggcagaggcaggcggatttctgagtttgaggccagcctggtctacaaagtgagttccaggacagccaaggctacacagagaaaccctgtctcgaaaaaccaaaaaaaaaaaaaaagggctggtgagatggctcagtgggtaagagcacccgactgctcttccgaaggtccagagttcaaatcccagcaaccacatggtggctcacaaccatctgtaatgagatctgactccctcttctggtgtgtctgaagacagctacagtgtacttacatataataaataaataaatctttaaaaaaaaaaaaaaaaaaagaagtgacaagttctgtaaaattgtaaatattacttattcttcatcttagcctagtattgtttgctaagccttaactcaaatataaactcatcagtgtgtgatgagtttgtgattctgtcttttacgcgtttcctaaagctgggctccctctgctctttgcacacccttatgaccatagaggaaaccgtgcagtcagaagccgctgtgtcctttgccgtggttgtgctgcctgctctgtgagcaactttccttctgagcctctttgtagtctgtctgtcttccttaagaaaagtgttgttactattattaaaagttcctcaataaccagataaatgttaaaaaatcataaagttggtgcaagatcaggaaggtagaaggtaaggaaaaaaagctttaaacaaaataatttaaaataacatatctcagtctttttctccaaattctgacttaacctactcttttcatagtttcttgctgcatcatttcattgtaaaaccccagttaagaggctatgataaatttagaagatcacagaagcttcatttcctacttaaatcactagagacgtcttgtttctctgcattcccacctttaaatgtttacagctgcactaatatgtagtatttagaacattgaacagacacatgaagacgcagcccactgtatctgatagcagttgtattcacatgctcttctttctgtggttcaggtgctctccccatgttcctgggagatggatcacatttgcctcttacatgtcttgatttactgagccagtttctaacttgatgtccccctgtgctcctctctcattagttccaacagtttcagcagttcattgtaaattagcatctgctttcaaaattcagactataaaaaagctactatatgtaatacataattacaatatgtcatgagtttctgtttggctaaagggataattccccctacagttattccagagtagtaaggccatatatttttaggtatgtttttgctcaaaaataaaatacagttgtgataactcatctatatatcaaatttatggaatcataaaaagagatttgttctttgaaatatgtaaatatgctgtctgactgtgcatagaaatctcccttttgtaatatgcagagctcagaataaatgagtttctgttatttgtgtgccatttagctaaaggcaacaaaaataattaaaatgctttttctctttgaggattgtcggttctaatttattaagaacagaaacggaaatgttgaaagtctgatgatgtgagctgttccacagacctgtaaacccagcatagataatttagagttgatagaagagaaaaaataaactagaaatttattttatgagtacttattagtatgaaaaacctaacaagattttaagtatcaatcaaactttcttattatatgaagaagcacatattgtcatgacattgtaggctcctgctggtgtaagccagcttacagctagttttattctcatgcagcatcatgaaccctagcatggctgagtaaagcagcctcactagaaaacatgtttatgtttatccattgataatgcagacacccatcttatctttcaaagggaaagaactaactttgtaatccacagaataaactgctcagtgcttgccccttccgataccatgttagaaacaatagatgctcgttcgtctggtggacacttaaatctagtgattgactttaaagtgagaggtaggggtattcttcacataagtgttattttatgattctttgagatgacatttgtggtatagctactaaaaggccataggtgtgaacatgagctctggtttcctaggccgttcttaactgtccttcctgtactgtttacttgtcagtttgctttcagactgtaggtcaccttgttggtggagctcaccacagtgtcgtgggattgttctcttgcctctgtgcacaaaggactaactgaacagctttatgacactctttactgaacttgtattccattcttatgatttgatttccataaacatatgaaaaaaaggccaaagaacaaattagttctggcaatagaagatcctttgcttgtttgccattagctaaggcacttattaatccatcaacatttctaaggtatgatctagttgatggtgctaaatcaaatttttctttatccttttattactatatacttttagtggcgggccatttgtttgttttttgaaatccagaatcatattgcccacgctggctcagactcaccattcagactgggagtgaccttgaacagcttccctttccaagtgctgggattccagagccagacaaatatgggagtaacagtgctagaactcagagcttcttgcatgttaggcaaatgttctactgataacatctcagctccaaattcagtttttatatcttaaattagaccttagctgtgaagtgcagatttctactgattgcttaatattccatgaagaaagtataggttgaaagtccgatgggagctcggtgccagcacataagctcccagctatagagctgtggggctctccctgatgcttcatgtagacaggaagtcaggaaggaggaagatgtcaataaggagcaataagccacgtactttatttatgctttgaaagaggctttcctttcacattgcctttattcctataatccccatgtgaatcctataattcacatctttcagacataaagagtttctcctaggactgctagcatgcacagctgacagtctgtccatgtacgagactgtctgtcattctgcagtatagatagtgagggcgaggactcgggtcggacctgtttccagtaggagatgcacaaagaagtaaagcaggatggtcttgttcagggtagaggcgcacagaaaaggtcactctcagtctcctcctggtcctcctctctgtgctttggacaagataaatgatgtttctcctggcttaagttgttagcatgttcttttaaaattctttatcacttcctgtggcgcacacctttaatcccagcactagggaggcagaagcaggtggatttctgagttcaaggacagccagggctacatagagaaaccctgtctcgaaaaaagatggcctagttggccatcattgggaagagaggccccttggtcttgcaaactttatatgcaccagggccaagaagtgggagggggtaggtaggggagcagggcggggggagggtatagggaactttcgggatagcatttgaaatgtaaataaagaaaatatcttataaaatttttttgaaaaaaaataaaggcaaaggggaagaagaagagagtggatgggatgagggatttgtggaggggtaactgggaaggggataccatttgaaatgtaaaagaataaactgattaataaaaaagtttatttctaaaaatcaaaaaaaaaaaaatctttatcactgcatctggtggaagtgaagagaaaatggtgctactttctaggttgaaaagggggcctcgaaaggttaactatcttccctagaagcacagtaaatcattggaatcagaacagtcatttagggcccatgacagttggtttccttggtagacaaggaaattacacatttccctgaaaggtttgtaagccaagaaccttttcctcttttaactcacaaacatatggaaagtctttttcatgaacttaccaaataatatcattatagggagtgagtaggttacatgttctgtggctattatggactttggaaaccctgtggtggtgatggacatcataataccttactccttgtgcaggtccccagcaatatatctaccttgggcccaagcaacagcagtgtaggattaaagaagacctccatatgtggagtagagtcagctagtgtcagctcagcccacaattattgggcaagaaaaatgtccccaaatgtactagtgatgtctgagagggctgttggctgtgtggtgatgcccagtgaggagagagattcagagcgcacatctgtctcctcttcagagctgccccagccattatgcctcacatcatggaggaaaggcggggtttgggcttcaccctgtgaactaagtacttattcagagatgaggttggaggccatgctgatctccaggtcttcttttgtctaaatctctacgtagacggttcttaacttttttcaggttgaaggctgatttaagagagcatgtgagagttacaaatacagctcagtggtaaagtgcttggctagcaagtgtgaggcctaggtcaacacccttgtgtgcacgcacacacaaggtgagagcacagtcagagagattcagacattcccaacaagagtctcactgctcttatggtagactatccatagtcactgtgtttgatatccaaacatatcatgtagaacatggtttttatattaaaatttttatttttaaaaattaaaatgtaagcataacatttcccatttcccttttctaatctctttgaagtaccccttcctttgctcactctcaaaatcacagcctcttttctttgtttttacatacaacacacacacacacacacacacacacaccaaatatataaatacaacctgctcagtccatatgatggactgttacttgtatgtatataatttcagagctgaccatttgatacctgataaccgattaggatcacccctgggaaagactgtttcatctaatctcagtatccttcaattgtctctgtatagttctttgtctaggagtggtcccctgtccaggattttcctgtagcatgtctgttggtattatccttattcaggtctttttaggcagcagtattgttggagtatcaaaagcttccctattgatcctaggaaatagtctaggcaagtcccatgcttctctggctcttacactctttcttcccctcttccatggtattaactgaaccttaggtacaggggttgtggacacactacgctttaaatcacagtacatgcatgttgtatttcaggaagtcattattacagcctaggttttcagcagcacatactaacattgaactttcccttccttaaagcttgggaaaatgcgactgacaatcccctgtcgggcacttacctgctcccaccttcagtgttttgatgcaactctttacattcaaatgaatgagaaaaaaccaacatgggtttgtcctgtctgtgataagaaggccccatatgaacaccttattattgacgggtatgtatgtttctatctctttttgtttttctgctattcaagtttgttgccatcaggtttgagataaaacctagaggtaattttttcaaaggtgtttgtttatggaattttcattattctagaaatcagtgagtaactaaaagtgagtaactagtattgtaaatatttttcatcttttaggatttttaaaaaacatttatttgggaaggtacattgtaaacatatagcagttagaagacagcattggagagttggttcttttcttctaccatctatattttgaggatcaaacttgggctgttaggcttagtggcaggaacctttccaccatcttggtgtctctcccatctttaaaacatttttttaaagattgattgattgattgattttgtatgagtacactgtagctgttttcagacacaccagaagagggcatcagatcccattacagatggttataagccaccatgcggttgctgggaattgaactcaggacctctggaagagcagtcattgctcttaactgctgagctatctctccagccctttaaaatactttttaacattggttttatttatggctgtatatattctacttgttgtgaaaacacatgctttttcctcttttttttcagcaccttctgtttattattttaaagcagtaattctaagcagacgatatacgtgtgtgtgtgtgtgtgtgtgtgtgtgtgtattgagtacatctaagacctacaaagtgcatgcattaagaggatgcatgatcaaattttgagattctagcaattgaaactcatccaataagtaaataaataaacaaacaaatagcttttggtcctaaacaaatggcttagcagttaagagctatactgcttttataggtcacccaagttcagttcccagctccagtgtatctgataaccttttctggtttccatgtgcacataccccccccccccccacacacacacacaaataatttaagcaatttgtaaatactacaggttcttttcaaagttgggctttttagaagaagcttggcttctgtcctgtccaccaagccctgccacttctgtccactgtcagggctcccagccaaggacaaccagctgatagcagttcctgttgttctgcagcttctgtttctagccttgcctttccccttttgtgttttcggtctctgtcctcaccattgcacacagtgagcagaggttctccttcttagccatctgtctgttggtcttgacctgttgatatttgcctgagtctgccattccccttaggtttctggttgcctttttgccactgaacaagaaacaaggaaatgcattgtgaaaagagaaaaatgcctccctaatatttctagtattcttcagcaaaatactcaaacaagacagattatttatagtatatgagaaaacataagagccttgaagacaataatacaagaattgaatgtatttgtcaatagacttacaacccagagctttaaaaatgttgagtcttgggagaatatgaggaagtagtgtttcctgttagatttttcagaaatgaaatgataactaatttataaatttagactaatagtaatattttaccacctctgtatagtatttatcttagttcttccttttcttataatacagatctctctcgctctttcaaaaacagaacaggaaataaaaggcatttttaataaaacttctagtttagtttttacataaattttgattatatgctactaataacttttagtaccagtatattttatttggatttaactgttggttgaacatcttttaaaattttatttgttttatgtatatgagtacactgtagcttacttcagacacaccagaagaggacatcagatcccatttcagatggttgtgagccaccatgtggttgctgggaattgaacccaggacctttggaaaaacagtgttcttaaccactgagccatctttctagcactggttagacatttttatatatatcccttcagtttatcagataagatcttttagcaatttgcaaatatagaatataaagtataaagaaaaaattgaatgtatataaaattaccatctagagatcattagtgtgtgcttttattcacacacagaatcttgttttgagatatgttattccttaaccacctcagtttttgtgaacatttttctgtatccttaaaactcttggggatgagataaggtgcttgctgccaagcccaacagcctgagtttaagacttaaaacccatgggtggaagtagagaacgaactcatacaagttgtctttagacctccacatatgcactgtggcacctacccacccatatagcacaaactaaagaaatatttttaagttgtcgtttctttccaggttccatggcatctttatgtaaactgtttcccgtgtagcgcatgtgtgagggtgaatgtagtttgtctgctctacttccctgtcttccatttacctctcataaaacacctgtgatctaagtgttctgaattatggttctcatgtctcttcacttaaaacatgttctattgtctgtctaggttgtttatggaaattctaaagtactgcacagactgtgacgagatacagtttaaggaggatggctcgtgggctccaatgaggtcaaagaaggaggttcaagaagtcactgcctcctacaatggagttgatggtgagtggcttcccttggcctgggtggttgcttgctgttgtgctacaccatggtttttaatatagaaatgcagactgttgaaattactgagcagtgcaaatagctcagtaattcttaggttattgattaaatgtccacaaatagcaggattccttttaaatcaactttttgcaagccttaagatgtttatggtactagattttctttttttcttctttttttgttttcctttagttttgttttgttttagactttggagtctcatattttgtattcgcttggctctgcctcctgaatgctaagaccaaaggtgtgcagcaccatactcagctacttttctttaaatattttcgtatatgtggggatagatttgactttggtgatttgctaggagaggaccagtattttctaggtactttagatgctgtgtagaaaaacatgtaacacacaatcctgctctaaaactacttttattctaaagtagatataaaagatgtatgtagccctagctgtcctggaactcactatgtagaccaggctgatcttgaactcatagagatcttttgcctctgcctccagaattattggagtaataaaggcgttaagatatattttgattattctaattcaaaattatttttcaaataattgattaacaaccaataaaaatgccaccatttttaaacccagtaaagcagagctaccttactacatcgctctgctaccccgtggtgttgctttgctaagtggatgtgctcgtctgcagggacactgggagaagaggattgacacgggtcttgcgttttaatcattcttgcacaggttgcttgagctccacattggagcatcaggtagcgtcccacaaccagtcctcaaataaaaacaagaaagtcgaggtcattgacctaaccattgacagctcgtcagatgaagaggaggaagaaccccctgccaagaggacctgtccttccctgtctcctacgtcaccactaagtaataaagggtgagtgctgctagaacctttgcaaaacactcatgtatgaaagttcatctgcaaagtagggtcaaggctgccaagtaaaccattgtgtgtgaatacaaactggagatggactctcctagggatgttgtgtttttgatgaagtagagtagagttctccaagagtttgtatataggattcatcatatcaagagatgtttctgggcctcgagagatggctcagcaattaagagtacttggtgtggggctggagagatggctcagtggttaagagcacctactgttcttccagaggtcctgagttcaattcccagcaaccacatggtggctcacaaccatctgtaatgagatccggtgccctcttctggtgtgtctgaatacagcaacaatgtactcacaaagatctgaatcccagggctcagtgaccacaagcagtgactgggcaaagctaaaggcccagagtcactccccagaagccaaaggaaggagaggattgactccgcaaggctagtgttgtccagtggcaaccctacaagcagtatactcccccagtataatcacaaataaaataaaatcttaaaaaaaaaaaaaaaaaaaaaagagtacttggtgtattatgcacagttcctagcacccacatggtggctcacaaccgcctgtaatttccactccaggggatctgatgacaccgtctggcttccaagggtgcacacacactcacgcagtctttaaagagatgactctgctgcatttagcagttctgatgcacatgaggatcaccaagagggtttgggtgttggtttggtttggttttggggtttgtttgggttttttttgttttttgttttttttgttttgcatttaaccagggttgttttgttttgttaagacttgttttatttgtatgtatgtgcttgtcagaaacaaccttcagtaattggttctctccctctaccatgtgtcaaactttgattgccagacttaatagcaagtgcaatagcgaggcaaatggatctctgtgtgttccagaacaacctgataaatgtaatgaaacccattcttaggaaagaaagaaagggtggggcgaggggagagagagagagaggggagagggggaggagaagaaggaggaggagaaaaaaagatgtcctttcctcatatttgaggtgttgctctcctttcaggatctgtttacagtcattgtccagttttagtctggtagcagccatcctgttgagagtgtgtgccgcatgaacagttgagccactagcctcccccaagtggacttgttcagtgtacacagtacagttcttcctgtgaactccggtgctctgccactctgctggccttcatgcccagcccagacttggacagcacagtgctcagataccttagttagctcttaggaaatagagcaagactgatgttctctgaatgtgaggaggcccaatgaagtgccttccacagctcctgtctggatcaaaacccacaaagattagatttcatttttgctgcttgtaggttttagaacattagcttaaaaactggaacctacttgctgtaaaatgaattccagtagagcacttacagtggaaagctggacacaccaggtcattgaaactggctgcagatgtgtgtgaggtgcaggaaagaactgcagtgacttgggcttccctgaagtagtcctcttttgaagacttgtctgtggttcccaggagcctcccatcatgttgttcataaccccatcactcataagactgtttggggccacctggactagatgacatcctgtccaataatattagtagtcatagtagtgaagacaacgttgatgatgatgatttcaacgtagtaagtgttctgaagaacctagagacccagatggaatgcttaggtgacacatgaattctatgacagacatatgagggacaaaatgtgaccttggtggatctggatatcttcagcctcccaaagaaatcaggagacaactgtattgttattttttttttgtgctatgattgcaaaattaagatacgttcttttgaaaaaaaatgatactttctaaaaaacaagtatataaatactctagagttaattttacggctgtcaaaatagtcatatgtgaactctgcagtatttttactatctgagttttttttttttttaaatcaggaaaattttggagtctttagaaatctaatattttttctttgaatatttattatagttcttcccaaaatagccctgtttattatgtttggaaaattatattagttgcattaactactttcctgatttgcccatgataaattgagcctaaatacagctctgcaaaggccagagcctcctctgtggatatgtagctaaaacctgtatgtctccagcattttaaaagaatggctgcatctgagcactgtaagtgttcacagtggcaaccagctggtagctgtagcatgaagcccagcaggtcgtttgccgctgtgcattataacaaggaaatacttgagagcattcacaaatagaagacaggcagccgtccacaactggaaagaatccggtactgtagcacctcgctgagtgttctattcacccagaagttccatactgtttgctagactgaggtgtttgtgaagacaagcagtcagctgctttctcctgttagaatctcttaagcgtagacaaggacacagctgaggaacgtggtgttttctagaggtttacattcacactgattgaaacacttctgtgcagcacctattccattcagaaatgtatagtgcatatttataattaggattctgttcctggaaatgtaagctttgtgtcatttgaagtactctaccattaaatttgtacctccacctacaagtacctgacatggagtattggaaatagaagatcaggggatgtggttcactggataaagtactggctataaaagcaggatgattccccagattctgtggaaggccagatcaagtaccacgcatatctaaatcaagaaggcagacagagacaggagaagccctgacactcataagccatctggcccagcatatccatgagtagtgtaggaataggcaggggaagctgttctcagccctccttgtgtatgcatgctgtagcacctgtgtactactctagtgcacaaacacacactgcattcggagtgaagaggcctatatttttccctttctcattactttgttttcctctgtgcctgttagcctttcatggttaggggttgtgtggagtggtgcataaatctccttaggactgtcataactcaaagtcagttcttaagtttctttcttcctccttttttctttcattttgtttggggtggtttgatttttgggtttggtttggtttggttttggtctcgttttagcattttgagacagggtttctctgtgtagccctggctgttctggaactcacgctgtagaacaggctggcctcgaactcagagatctacctgcctctgcttcccgagtgctgggattaaagccacaatccacagcctggctgtcctttttctttaagggaaggaaggagacgggtttggcatctggctgataaagcctgctggtgcttttctggagttcctttttcccttcagttcaacccttatttcttaatacctctgtccctcctttatactttgggacactttggtgccttgtctgctgctttgattggcttcaacagccctattatttgactatactgatagctaagctagacactgggtgcaccaaagtcactccagagttcactctgagcaagctttaagtcagctttcttctcagtgctcagcttgctacattgccctagttgtctctattttccttaacagggtatcttagtcagggtttctattgctgagatgaaacaacatgacaaaaaagcaagttggcagggaaagggtttgttggcttacacttccacagcactgttgatcatctaaggatttgggggtagaaactcaaacagagcaggaacctggaggcaggagctgatgccctctggagaagtgctgcttactggcttactcagcctggtttttaaccaatcactagttaagaaaatgctttccaggctcacccaggactacagaggcactttctcctctcagatcagatgaatgtgccatgtgtcaagttgacaataaacttacccagcacaaagagtatccctagagtgtcactccctaccccattctgcacctccttagaaaggaccacagttgcctttttcaggagtgccttccacccgtgtccaacatggtaactcaactgggtgttgctcctgcgttctcagagtggaggatggcgatctaaggactgtgtggactgcatgaatagttttaccgtagcatctctgattctccttacagtgtctgcaaacactaccacaagcctaaagtagttcttttttttttattaggtattttcctcgtttacattttcaatgctatcccaaaggcccccccatacccaccccccctaaagtagttcttaccattgactttactgtttgtttgtttgttttggggggttttttgttactcttaattttttatcctaaaaagtaggacttattgtggtgtatacaattgcatttgccaaactgttaaagtgactattaaattttctgaacatttctttcccccagcattttaagtcttcctcatcaagcctcgcctgtgtcccgcaccccaagccttcctgctgtagatacaagctacatcaacacctccctcatccaggactacaggcaccccttccacatgacgcctatgccttatgacttacaaggtgagttcctgctcctctgctgtgtcacacaggctgacagagtgtgctgtgtcacactctgagcagctgcagtctggggatgggagcgagcgtaggggaaagtgagtataggaagaacatagctttgggtcttcatgataccttcctcagtagccagcgctcactgctctggaaatactggggcagtggtcttaaggcattgtgagttcccagtactccataggctgttgacatacttctgtatgtggccttgagttcgatggaaatgagtgttggttttgttctttgatgatagctgcatgtaacagatactgtgtgtattacaagagatggacttactggatagccctggtttgggcctaaagctctccatataatagaccagactggcctcaaacttgctattattctcctgcctctgccttccaagagctaggatattaggcatgcactgcattgtggagatgctacatgccatggcacacatggagatctgaggacagcctgcaggaattcattttccttccaccatgtgatcttagggatcagactcaggtcatcagctttggtgacaagaaccttcacccactgagacatcttgtcagcacttttttattgtcttataagtagtgacaaattgagacatttaaaattcttttgaatcttacctttttttttttttttttttttttttgagatagtctttctatgtagtcctgcttggcctcaaactcatagatatataccagccagcatatactgtcttgcacagactcatctttttttctttttttaaagtttgatatgtcagtacattcatttgtatcttaaaaagaatttcagctatagatttatctttataacttagtggcttatggactaatcatttaacttcccagatgcagggtactctgagcagttttctagacagctctacttacctatttgcacacatgcatcactgtcgctacatcctgggagtggttgccagcacattgcattgctggtgtactcaaggttggacatcagcatgagaccattggttttcttgctctaatgttaccattatataagttaggaagggtgtgcttgcacccgggaattaagagtcaggctttttgtgatgccaccagacacttacttttaaggacagggtctcctatatctcagactcgactgcctcctcctcctgaatatgaggagtaagggcatatgccaccatgcctagccgtacagacacccttgggcttcaatctggactagatgacaggaagtaaacactttgacagggagaattaaaagctttgcaataatctgtgtgactcttaaatttttacctgtaaagtcaacccaaaagtcatgaaagaccctaagaggcacttgtgtggagtataactgggtggaaaggatgcttaagggctaggggtgtagctcagtgtgtagcacagttgccaggtgtacatgagatgatgggtttgagtctcagtaccagatcaatggtaggtaggatgtgcctgcagtcccagcactcaagaggtgaagacttgattaagaagttccaagttggggctggcgagatggctcagtggttaagagcgccgactgctcttctgaaggtcctgagttcaagtcccagcaaccacatggtggctcacaaccatccgtaatgaaatctgatgccttcttctggagtatctgaggacagctacagtgtacttacatataacagtaaataaatctttttaaaaaagaagaagaagttccaagtcagcctgctctacaggagattccatctaagcaaacagacaggcaaatagatagattaaataagagcaagttactgttgccaaaacttgggttttgtccttcatagtctacaggtagaagtgccgtagaaccttcagctcgacttctcatagttttcaatttgttctttggttggttggtttgtttgtttgtttgtttgtttgttttggtaggtttttgttgttgttgtttgagacagtcttcgatttcgccttagcaggcctggaaattgctgtgtagaccaggccagcatctttttttttttaaaaagatagatttattatttatttatttatttatttatttatttatttatatgtaagtacactgtagttgtcttcagacactccaaaagagggagtcagatctcattatgggtgattgtgagccaccatgtggttgctgggatttgaacttaggagcttcggaagagcaatcgggtgctcttacccactgagtcatctcaccagcccccaggccagcatcttaactaagaaatctgtctccttctgcctccttcaagtgctgaaattaaaggtgtgtgccaccatggaccgtcagcccttgtggttaaataggaatgcagagggcctgggctgtaagactaaagtgcaggatatttagaaagatttgcttttcctgtttgttgttttttttctctgaggtcattttttttttctttccacaggattagatttctttcctttcttatcaggagacaatcaggtatgttattttgaaaataatcttcttctttaattgcatattaaaatatctaaaagtataatacacagccagaaggaagaatgaatttccttagaaaatagagtgcatgtgcccagggttgctctgtctgtaagaatttaaataaaagcattattcatcacccaccatcctcagcaaagggtaaaggcagtcactgcctgttgatttctcaataatgttgtataaagacaaacacagggcagtgagccgtgggacaaagtatgagaatgtcctggtgcccaggacagcatagctgctatagtctgtgttgctactgcattgccagttgtatgtttgatacatagagtcgtgtgcagtctgtgagtactcaatgttggtagcaaagatctattgacttttcatttttacagaatgctgtgcttcctcatactgcgtttattgcagctctgattgcttcatcttctcccatgcttgattctagctcatactgttttgttcatctcagtccctaaatgtacaaaatgggttgctaaaaggccatatctaatgacctggatacaaagttaaaagtgattgagtatggaaggaaacagtcagtgattcttatccaccagtcaggctgtcccattgcaccagagcgacagacttgaaaagcaagaacaaagtggaagaagtctcatcggaaacagtgagacaaacacagattgagaaaggcctacttcagccatagaaaagtggctaaggacatggactaaggaccagacacagaagctcctccctctctgtactgtagttgtcactgtccaagcagtgaccaggccgctgtccagaatgccctcctgggtttcatgcctgcaaactaaagcactgatggaagagtagcaaactttgtaagaagatgtgcattggtgatgatgctcatgtgcatcctcttccgtgcctgggtcaggttgctagtcttgttccaacagcataaaagtcaaggaggtttttgggattttctctttttttagggtttcatacatgagtatactttatttacattatttccatccatctctttccctccttcagctcctcctatggtcctgtatatacacttttaattttttattactattgcacacatggtgttgcttggtgtaacagcatgtatttggaagtcaaaggacagctgtgtggagtcagccctctccacttctgtatgtgctccacccattgatctcaaatagttgggctacacagcaagcactttacctgctgagccaccaagctggctgatcaaagagattttgggaaagggacaatccaagcaaggcccacagcatgttctgaagaatgggcacccgctcagcatgaaccctagtaggtcatcggggatccggaagcaggcatggtccctgtcctgaaaaccttccaggaaacaagatgtggctagtagactgattgtaacccctgcctgacctgtgtagacctgagggagggtgtgtgtgatgaatttgtctttttagaaaaatacataactatatctcctatatagataggaagaaaggaattttttgcatagccatatggtgtattcatgttttaagtgtttaattataaagaattaagtagtcagaagcctaagatttgtaggcagttaatggttaatgggggagacattttcttcagtgatatagccagtggtaagttgtctgtgctctgtaagcaacactgacatttgaagtggactgttggaaaaggaaggagaccagctaggggaagaaagagcaagagaaagtagtagaagtggttatggttaaaagacatatacacgtgaaaatgttagaactcattgtgtttaatttgtatgttatgaatgttttaaaacaaagtaaaattaaagaaagatagctttgggattttttttttttaataaatatagaatggtctaagcacagagtgctggtaaagcccacatagtgcacagatctgtcctcagccttcacagccactccgcagtgctccctgacccggagagacttgcagctccgcacacccgactcagagtgccccacgcaggtgggacattgcttggtttttacagcaagttcttcctgcgcttcccagctcagagatgttcatgtgcgcaaaccctttgcccagcacctacagtgctgagagcagaagcaggctgcaccgagctgcagcccagcctgggagcagctgagcagctgtgagacagttctcaagctgaacttgccattggaaatgtgggatgtatccttcctactgcttctgaacacctcagaaacagagggctaagaactgcatgcaatacaaactacatgcacacacaatcaaaaatgtcattccagtctcagataccatgccaaagcgctctcagtaatagtgaccagtcgtttactacagaatgtgttgtcacttgaggagccttgttctgctgagaagagtacgccgaggtgcatctgattgtaacagagtgttttgtctctggtccctcctagcattacaacacctccctgctagccgcagctgcagcggcggtctcagatgaccaggacctcctgcactcctcccggtttttcccgtatacctcctcgcagatgtttctcgaccagctaagtgcaggagggagcacatctctgccagccaccaacggaagcagtagcggcagcaacagcagccttgtgtcttccaacagtctgagagagagccatggccatggtgtggccagcaggagcagcgcagacacagcgtccatctttggcatcataccagacattatctcattggactgacgctctcaccctgctgctcccaccccatcccagattaaatgacttggcagaagagaactctatgctctgttttaccttatcctgtttagaaaagtatacaagcgtggttttttttttccttttttttagggaaaaaaaaattaaaagaaatgtacagagaacaaaactatattttcagttttacttttgtatataaatctaagactgcctgtctgataaaacacttgtttaaaaaaaaaaaaaagaaaaaagaaaaagaaaaaacaagcacccacaaaccttcagttcattttttctggattctgaagacttcaccatttgtcctgtggtttgggttttattttacttcaatggcattatctttcttgcaataacggaaacaattgcatgtatgaggtttaaattgtgggctttgttgtggggatgggtttgggatagctttgatttccattttttaaaagtgacagacttggattctgtttgtgtgtgcgtagattttaccagccttaagttatgagcctcgtctatcttactgcataccctttgttttcaagacagagcttgtgtgcgtgagtgcgtgcgcgcgtgcgcgcaagagcgcctgtgtacctgtatgtgctgttctgtcgtcactcgcccctcctcctcagtttgcatttggttattatcactcttgtgtgagcatctttctcaactctccctaggtgcatgttctccatcccagatcctctgtgatctgctgtctaccctctacgagtgtgtttcccagaagtgctggagcaaacgctgcttggatgcgcagtctgtgggcaggccctcgaatgacaatacacttctgttgattctaagtctgaattgccagtattctgtatgtaatccaaggctgtgagcacttgcattttggcaacagggtaacaagttttccttgaggatcttcataccaaaatgggatgtgaaagaacccccgtagccccgtggggtgtggagctggcagaggtcgttccgttccaccgaaagaaaagaaggaaggaaggaaggaaagaaagaatcggttatcctaaagttaacagtacagcacagcccacatgtggatccataccaaatctatctgataaatagttgaaactcaaaaataaccttagttattttggttttctgtctccgagtatacttcctttcttagccgtgttcttttttccttcacctttagtgaaagcatgacataggaagcctttttttttttaaattcaagaaccaattggtctcacctactctcaatagcagaatatgtaaatatattaaaatttgtttcaggaggtgattaagggtcaaaggaaggaaaaaatacttctcatacttgagagtccgcagagaagaaagcatgctctgacagtgggagatagatggcaactgatggaggatgcaggtgtaactgcagagagccagggcacaccatcaccagctcctgcactggcttttatgtcccaccttcatgttttcagagttgtggaaggaccatctttgtgtgtggtaaacttgttttcaagccttgcatccataacagaaggaccggtaggtattaatccaggtagaagtcatgatgactgtgtcttcagttgtataataaaggaagtggttcacatgacagcgtggcatctaaaaataatatctattttatagtctctctgctactaaaatgtcgacttgaatttttgaaaaaagttggtgttgatatgtatatgtgtgtgtgtgtgtatatatatatgtatttataaacaagtgcgtgtgagtaacatcatcgtcttcccctacgcatgtgtgttccacacagaaacggctgtgttagagtcacaaaacaattcgcaataaaacaagacatttgttatcagttaaaaccagaaatagttatgtttttaaattcatctggtgttatgaatacaggttctaccatctctcattactgtattaatttagactcacttcagataaccataatttgtctaaattgggattatagtggaaatcactgaaattttgaggtgtttctattaacatagcaataggaaacattattttaactgaggtaaaatgaatagttttctttgttcttggttttgtttgggtgtttttggtttggtttggtctggttttggttactgttagtagttttaggatactgatgcatagttttttgtgtctgatgctgaattacaaacttaaaataatccagtttaaaccagctctctgcattcttcatgccagctatagaggggtcactttccttcggtgtcctgccttgtaccagcctaaggggagagccggtaactggaggaatagatgccctgtggctttggtcatgtccccacgggagaacaagccgtttggttgtctgtatgttttagttccttccatttactgaggagttcacttcttcagtgttgacgttctaaaatgttgcatgtggtcaagttcagtcagagactttcacaaccctgaataattattagagccacacaccactttatctcctgcattaaaagaaaaagcgcatggtcactttgtcccgttgttgtcgtttttccttaggccgacctcactccccagccctgccaaccttgattaataggctgtggacagataatgttctcagcatctttgattcagcaagctgccaggagctccttccttagtctctccctctggcatgtgttctctacagtatcgtgtgtgtgctcccgtctttctgtaagcacacaccatcaataaagtagccattcagccaggagggtagaggtggcttttaatttaccatgtgggcattactggacacatttttttaaatatgaaacttaaccatgcatactttgttgagtattgaagttgttccactgctaatttagatgttacacatctacattactgacttcaagaatcactaaaggtttgaaaaatgtgggttcttttggtggcggtggtggtggtggtatattttttttgtcgttgttgctttttgttttattctttttttcagccaattttccttttgagacaagtctgtgaaaccgaatgaaaatatgccctaattgtaaatgaataaatgtagaaagaacctagtttttaaagcagtttcaattttaaatacatgaaactttcagaatcttcaggactcttaaagcacatttgaatttattttggtaagaattttgttttgtggatacacgttgaattctgttttttttttaattaaacacaaagtgtagctttcaaggagggagggagagtagccggtggtcccagagcgtgctgctgctgttttattaacataggggaagatgtatataaatagataaagattaccataaattccatgaacttaaatctgtgattcattgccttaagactttctctcttagaatttccataccgcatgccaaaccagtaaaatggcttttaaaaaatgtatagtagaccaatgtcagtttgtataaaagtaccaagtgaaaatatttattacatgcattggagaaaagttgtttccctgttgaatgttacctgtttctgtagagctctttagatgtaataaaagagaagccttcagttaatctgtgttctgtaaaatgctactcctgggcccacaaaggaacagtccccatgagaagagtactggtgctgtgtgctcccggggccccggtcacccagatatcccaaagcatgataagtaactgctatcttcctatcatgctttaagaccttaccttattggtttacagctcaccttaaattctaaaggtactagtttatctgctgtgcaaataccactctttatggtgagcaactaggtactagggaaacttgttggaatttgaggaatgcataagaggcagccaaaccatccctgatacagctttgtaagccagacttgaggagtgtgagctcaccctgtcacccatgactagagcagtgggcagggaagagcaacccaggtcatgcagaccacctgctagccatgtgctcctttcaagctgtactggagattccacttagccgaataggattcataaaatgtgcattaaaactacactggagactggacatcatggctctcgcctttaatcccacctttgagaggcagaggcaggtggatatctgagatcaaggccagtctggtctgcagagcaagttccagaacagccaggactacacagagaaaccctgtctcagaaaaagccaaggaaaacaaaaacacaaagcctacactggaaggctggaggtgtttggcagaacgattgcctggcatgtgtggaacattgtcagtccccagtgtcaagtaaaagaggcacagtatacacctgtcgtctcagcacccgggaggtgggggcagggtcagaagcacaagggcatcgtccacaaatttgaggtaaatttgggaatcatgagatcctgtctttaaaaaaaaaaagtcactgacagacatcagaacggtaggaagtgcctctggtgtagggcccagcctcttcccactctgccccacacagggcatcagcatggaacatctgtcagatctcggattctagagtggtgagcagatgtgattctaaagctgtggctagagtcagaggtgctggggtctggaaccttcccactcaacagaaatacataaccgactctctggagtctacgtctagtcttccccaggaggacttatcatgggaattaggaagttttgctgtgttttgtctgtacttactctggctccctaaaacagcccagaaattctacatttttatctgtgtttcccaggcagactcttgcattatatctcatgttagcctcaaaccaacatcctctttgaagggatgtgccagttatttagcttttttgggtttgttttgtttgttggttggtttggttttgtgttttttggggttttttgttttttgttttttttttttctttttgtattgttggcttgtttatttttggaggttttttggtttttgtattaaagaaatttgccaggttgcttataatcaagctactcaggggacacatagtatctactcccaggaaaatgaggctctcccttcaattgtcttctgtttggtctgagccatccagcatatgtgaggtagctgaacccaggttgccggtgtttagttccctggagtgtttccactcttagcccttagtaagatgtgtgtcttgtctgcttccccagagacccttgtgtcttgatatgtctttctactttcgtataaggcacaaagccacaggcagtcctgacacaaaggaatgaaggtcttcatgtttagagctctgcaccctacgtctgctggagtgttgcgtgggtttcctggctatcctggctaggacactggttcccactgtggccttcagggcctctcagattctggccatgacatggtgcatctccttattctgttagtcccaagagaatggctgaaagtcatgatcacctcgggtcacttgagcagaccatcctagttcctgtaacctaacagtggccccgggcccagcttcagcaaactgccaggagcatcagaaagacgtgcttaactccacgaggcctcccacttcctttggtgtgggatatcaaccaaccgtacactcctctaatgtttgttttgactttatacctctttatgaaaaagcttcctacacttggtctggccagggagatggaaatgaagatttatcagtgggattgtagaactataagaaatgagaacaagaaaatgaaactccagaaaggaaatgggtgtgtcgtgtgtgtgttcatgtgctatatgcttgtgctgtgtctgtgtacactgtttgttgctgtatgtgctctatgcttgttgctctatatgtgtgtgcaagtgtgtgcatgcgtgtacacgcactctgtgcttgttgcctgttcccagccaacctcagctttatcttagaaatgttgaaggttgtttttgcacccaaagcagactggtcttctgggcagactgttcttttagagaaacactaccagggaaacaccaattccacatgctttgaagttgccaaccatttattttcagtcacaatcttcatccttatgaggtccaaaggctttgagaagtacaatgggtgaggggatgatgttgcagaggcagcactggcacacaaccctgactacaaatcatagggctagactatgctgcaaatggctagactaatgttagtaccgaaatcaagacagaccttattacagttatccaatgccatggctacatcatttattggtacttatgccatgcagtggttgtgtcatctctagacttcccttacaaaaaggaatcagtctaggttttcaggccccgaaggctctcatctgctctcttgatcttggctcccttagtagtctcgcacaggaatggtgatcctctggataaacgtgtcatatttcacttggccgtttggttcaatgcctgcttccttgaaaagatcatccactgcaataaatcacattactgtttcaatttggatctgctgatgttaggggtctccagaagtcttccctgagaatctgatagactgttccccatggactgggatacaagccaaaatgggagaataatctgcttacaagaacccagaactttttctttctgcagggcctaggatacgagaacagagtacactggatcggtcactgaggctgccttgtacttgattttaattttttaaacatcttttggaggggaggcatgcataccacacatgtggaggtcagagcacagcttgtgggcatcagctctctccttccaccatgtgggttccagagatcagcaggcttggcagacctctgtctgtctttcaagaaacctttagcatggatgttgtacctgtgcagcccacccttgtaacctcccagtcacaggggcatcgtccatggctccaaacacagccacactaatctaggctcacacatgcacctctcctccacaaaaacccacctctccccttgctgccccccaccaatggaatactgagtggcaagaggtcggttactctacaatctagtctacaagaggtctgttactctacaatctagtctacaagaggtctgttactctatagtctagtctacaagtgtctgttactctgtagcctagtctgcaagtgtctgttactctatagcctagtccgaaagtgtctgttactctatagtctagtccgcaagtgtctgttactctatagcctagtctgcaagtgtctgttactctatagcctagtccgcaagtgtctgttactctatagcctagtctgcaagtgtctgttactctgtagcttagtctgcaagagtctgttactctgtagcctagtctgcaagtgtctgttactctgtagcctagtctgcaagtgtctgttactctgtagcctagtctgcaagtgtctgttactctgtagcctagtctgcaagtgtctgttactctatagcctagtccacaagagtctgttactctgtagcctagtctgcaagtgtctgttactctatttcactacaaaagggatgaggtaaggagagcacaccgccaacgtgcaccttgattggagttggatccctaatattaatttgaaaaatgtgtcttgtcaatgcacatgcaaaaagtagatccaactgcaactgaagttcaaagcatcaaactacattgttcaggggctggaaagatggcttagcagttaagagtacaaactactattgagagaaccctaattccattcccaggtgatttgtaggtggctcacaactgcctctaacctgttccaggggatctgatgcccattatttgccctccgtgggcacctgtacatatatgtgcaatcacagaatctttttttctatgagaatcttttttgtttgttttgagagggtagcactgcctagaatgtcctttgtagactaggctggcagctggaactcagcagagatgagcctgcctctgattcccaagtgctccgattaaaggcctataccaacacacctgccaaataaaatcttgttgaaagtggaattgctttttaaaagatactaattcagctaggtatggtggtgtgtacaactttagtcccaaaactctggaggaagagacaggtggatctctgagtttaaggctagcttggtctatatagtgagatcctgtcagatagatagatagatagatagatagatagatagatagatagatagatagatagatagatagatagataattagcttggtctatatagtgagatcctgtcagatagatagatagatagatagatagatagatagatattagcttggtctatatagtgagatcctgtcagatagatagatagatagatagatagatagatagatagatagatagatagatagatagatagatattagcttggtctatatagtgagatcctgtcagatagatagatagatagatagatagatagatagatagatattagatagattggatatagttctctctttttaaacccagaggtgctctgagcctggggagacaggtgcatcttatttcatggaacagcttctaacctgcagccagttagtgaatagccagccacagagaacaggccaagtatctgctccagacagaccagaaggcagcatgccacagcccaatgctgaccagagtgggcagcactctaaggctaggtgatagctgtgctgggtactacatgtgtccacgatgcttcagaacagaatatttcttctgagtccccagaagtctctgccagccccttcccaattgctgcttagcatgagggaagtctagggcctgaatatccctgcaggcagatcgctaaccacctgagagagcactccaccagcagtgccatggagtctgaggcaaggacaggccggttttccccttcacatgaaaagcagttgcagtaagtgcttccagctgagagacattgagagctgaatctgcctgctctgcaccatttttaagagctttgcccgggaccttcctgagtgcagatacgatctgagcaggctggtccatagactgctagttcttgaaggaccccagggatacctgtgagaaccccatttacagcaaggggaagaagctcatcccaagggctccctaaaggaagggcccggattcaaactcgattcaaaccgcaacctgaaaactctgccttcgttagttgtaatctggccagaaattaataatcaatgggtattgggccttttcacccctctgtgcctaagctgaacctccatttgaccctacaagctccccacacaacctgaaaaccctggctttggatacaagtgatgctgaccaggggcaggccgaagtctacagttgtatcagggtcagggctgccaacagtgttagtgggctaggaagaaagacacctcaaatggcccaagcctgctagagcttcctcacaaggcccaggccctcatcctgttctgaagcaaaaagtgttgtaggcaagatcacctcatagtcgtgaccatgacaggtttctctagccacccctgaaaagctcccacagccccagttcttagggctgctaggggcaggggcacaatggcttctcaatttggaaacaccacaggtgactgtacccgagccagctgtcgtgagaagatggccctggacaggagaggctcctacaccctgcactctgcctcagctctactcaagagccactcagctggccccttgtgtcagctgagccagtgtgtcctgtgtcgtagcttttagtgtgtatggcttgtgtgcacatgtgtatcacagctcatgtgtgtggaggctcacgtgcaggtgcactggcacctatgtatggaaacccaaggttgccatctggtgtcttcctctacggctgtctacttttgtttcaggcagaggctctccgaacctagagcctacagttcggatttagtctagtcagcttgccctagcattccgtctctgctccccccccccccca

SEQ ID NO: 2279 - DNA, 1956 bp, Mus musculus
atggcggacagtgcggaactaaagcaaatggttatgagccttagagtttctgaactccaagtactgttgggctacgctgggaggaacaagcacggacgcaaacacgaacttcttacaaaagccctgcatttgttaaaggctggctgtagtcctgctgtacaaatgaaaattaaagaactctacaggaggcggttccctcagaaaattatgacgcctgcggacttgtctatccccaacgtacattcaagtcctatgcctccgactctttctccatccaccattccacagctcacttatgatggccaccctgcatcatccccactactccctgtttctcttctgggacccaaacatgaactggaactcccacatctcacgtcagcgctgcacccagtccacccggacataaagctgcagaagctaccattctatgacctgttggatgaactgatcaagcccaccagtctagcttcagacaacagccagcgctttcgggaaacctgttttgcatttgccttgacaccacaacaggtgcagcagatcagcagctccatggatatttctgggaccaaatgtgacttcacagtgcaggtccaattaaggttttgtttatcagaaaccagttgtccacaagaagatcacttcccacccaacctttgtgtaaaagtgaatacaaaaccttgcagccttccaggttaccttccacctactaaaaacggtgtggaaccaaagcgacctagccgaccaattaatatcacctcacttgtccgattgtccacgacagtaccaaataccattgttgtttcttggactgcagaaattggaagaacctattccatggcagtatatcttgtaaaacagttgtcctcaacagttcttcttcagaggttacgagcaaagggaataaggaatccggatcattctagagctttaattaaagagaagttaactgcagatccagatagtgagatagctactaccagcctacgggtttcgctgctgtgtccacttgggaaaatgcgactgacaatcccctgtcgggcacttacctgctcccaccttcagtgttttgatgcaactctttacattcaaatgaatgagaaaaaaccaacatgggtttgtcctgtctgtgataagaaggccccatatgaacaccttattattgacgggttgtttatggaaattctaaagtactgcacagactgtgacgagatacagtttaaggaggatggctcgtgggctccaatgaggtcaaagaaggaggttcaagaagtcactgcctcctacaatggagttgatggttgcttgagctccacattggagcatcaggtagcgtcccacaaccagtcctcaaataaaaacaagaaagtcgaggtcattgacctaaccattgacagctcgtcagatgaagaggaggaagaaccccctgccaagaggacctgtccttccctgtctcctacgtcaccactaagtaataaaggcattttaagtcttcctcatcaagcctcgcctgtgtcccgcaccccaagccttcctgctgtagatacaagctacatcaacacctccctcatccaggactacaggcaccccttccacatgacgcctatgccttatgacttacaaggattagatttctttcctttcttatcaggagacaatcagcattacaacacctccctgctagccgcagctgcagcggcggtctcagatgaccaggacctcctgcactcctcccggtttttcccgtatacctcctcgcagatgtttctcgaccagctaagtgcaggagggagcacatctctgccagccaccaacggaagcagtagcggcagcaacagcagccttgtgtcttccaacagtctgagagagagccatggccatggtgtggccagcaggagcagcgcagacacagcgtccatctttggcatcataccagacattatctcattggactga

SEQ ID NO: 2280 - protein, 649 aa, Mus musculus
MADSAELKQMVMSLRVSELQVLLGYAGRNKHGRKHELLTKALHLLKAGCSPAVQMKIKELYRRRFPQKIMTPADLSIPNVHSSPMPPTLSPSTIPQLTYDGHPASSPLLPVSLLGPKHELELPHLTSALHPVHPDIKLQKLPFYDLLDELIKPTSLASDNSQRFRETCFAFALTPQQVQQISSSMDISGTKCDFTVQVQLRFCLSETSCPQEDHFPPNLCVKVNTKPCSLPGYLPPTKNGVEPKRPSRPINITSLVRLSTTVPNTIVVSWTAEIGRTYSMAVYLVKQLSSTVLLQRLRAKGIRNPDHSRALIKEKLTADPDSEIATTSLRVSLLCPLGKMRLTIPCRALTCSHLQCFDATLYIQMNEKKPTWVCPVCDKKAPYEHLIIDGLFMEILKYCTDCDEIQFKEDGSWAPMRSKKEVQEVTASYNGVDGCLSSTLEHQVASHNQSSNKNKKVEVIDLTIDSSSDEEEEEPPAKRTCPSLSPTSPLSNKGILSLPHQDVSRTPSLPAVDTSYINTSLIQDYRHPFHMTPMPYDLQGLDFFPFLSGDNQHYNTSLLAAAAAAVSDDQDLLHSSRFFPYTSSQMFLDQLSAGGSTSLPATNGSSSGSNSSLVSSNSLRESHGHGVASRSSADTASIFGIIPDIISLD

SEQ ID NO: 2281 - DNA, 377478 bp, Homo sapiens
  misc_feature (1)...(377478): n = A, C, G or T/U
cccacttcgttcttggggacaaactttatggccccagggcctttcctccctcctggcctctccagctagagcgggacgcaggtgcagggtgctggacgcaggtgtgcggccgcttacctggggcgtgcaggccttggggctgcggggaggcggcgggcgccgcgcgtggcccgcgggcgggcggacccggggagggcgctagcgactgcgcgggcggtgggtgtggcgccccggctctcagctgtcaggcgcgcctgccccgccactcgggctgtgaccgcgccgtccccgccgccgcgccatgcgctccaggcttcggcctcttcttccggccagtccccggcctcggggtcaacggctcagggttcgcatctccgcgcccggggccccggcgccccgtgcccgctgagagcgggaggggccgcgggtgggagcgcggagaaccagggagcacggctgtgcgcgcgcgcggggaggggccgcgccgtcacccggagagcccggcggatcccggactcccgcccgccgctcctcccgccgcgcacctccgctcaccgctcgcccggctccagccgccgccgcactgtgagtacccacgtccggtagcccgccgcccccgcgctctgctcctgcagcttttttttcgtttagttctgatttgggctcctgtggctgttgtttttatgattatacctaaagacaccaccgcctcgctcccaccactgccagtctcccgcttcgctgccctccccaagctcgtccatctagctccgggagccgacgggggttcctcaagctgctctggctgctgctccttgtcgctgcatatggctcttcgcctgtgctttccgctttggcccccgaaattccgttcctttcctagggacccccttcttctgactccgggcccggacccccctcctctcactcagggaaaaccgcgcagggacccaggaccctcaactggggtacgctctcggctcgggcgctgtcttcactgtatgcgggccaggcatagttgccgatttcgagaaaccgagaagctgtcatttcccagcgctgcgcgccctccagccacctccaggagggcgcgaggcttgtcagccggggagttaggacagtgtttttgcctcctacaatgatataaaggacttcaacgcgaaataagggtcaacttattttagttcgatcctcggagataaagatgaaacagacagataatacataaatagcttgatacttgaagaaggtacaaaacagatgagagaaagaggaacgagccggcagagacagctcagggacagataagatcgacaaatgagggtctcctagacaaatagagaagaagggagagagacagataaacagaagattccagtctccttgctgaaggcttttgaactgggatcccctgtctggagctgcccctctgaaaacggagttacattcagggccgactgcaggggaggagccctcagggttgggctgccctggccgcaggagcgcctgcagccttgggccggatgggagcctggcttgtctgaggacatgtggctgggtcaggcgacctagagggccccaaacatcagtccccaagtacccccgctgctgaggtctgcctgcacagctccctccctgcctcagccagaaagcaaagtgcaaggaccagcagcaacttgtgtgcctggagccttgcaatggctacgaagatggctgagattccttctagcccatatgagccgggacagcgaggcatgaaggatactcagagaggtgatgcccctcaaagaggaagcccagagccccgaatcctgcagttggcccgagtgggaaacgtatatctgaaggaggaaagctcaaggagtgggcgactggaagctaagaagtggatcccaacaaagttccttgagaacctctctgtcccacacgttgacctcggtggaaaccagctttggtctggaatacagctaaaaatgcagaaaatgtggttagaactgcaggatcctggtctcactaatagctggaaagaaaacggtttatatatccagccgaaatctttctgctcaacgaacgcgggcgccagccgtgagaggagaagctcgggtttgtggaaactggcaatgttgtcccctgaagccggctcgggcaccaagctgggtgcggtgggggccgcgctaggtccgggtgcgcaccgagcgctttggagagggtcaggttcagcaccgcgaacagcggtagcctccgcctctctccttccctggcagacacggttccctcctccttctcctcacccccctccttctcttcacccccctctaccccctgctgtctggagatgggcagtgaccgcccctcccccctccccacccctccttgcactgcccccgcccgcccgcgtgcatgcgcgactgagcagaggggcggccgatccccgaagtccgggcttcaggacccgggccggcagcaccggctgcgagggttgccgaaggcgcacggatctgggcgctgaaaaagccaggatttggcaatggctttgctgtgtggccttgggcaagtcactctgcgtatctgggtttcacttccttcccaatccgaaaacgggattgggttccttgcagcccgggcattcctgaggtctcctttaccccttctcctcccccaagccccgggggctgttgttaacggcgccaacatgggtctgagtaacaaaagacgcctgtccagggggtgaatgagtttggactccccactgccaagtatcccccgcgcgcccaactcggagcgccctgctgggcgggcccgagcctcggcggcggcgctgaaaatggctcatctgctctctgctttctctatttcgcaggagcggcggcatggaggctctcaccactcagctggggccggggcgcgagggcagttcctcgcccaactccaagcaggagctgcagccgtactcgggctccagcgctctcaaacccaaccaggtgggcgagacgtcgctgtacggggtgcccattgtgtcgctggtcatcgacggccaggagcgcctatgcctggcgcagatctccaacaccctcctcaagaactacagctataatgagatccacaaccgccgcgtggccctgggcatcacgtgcgtgcagtgcacgccggtacagctggagattctgcgtcgggccggggccatgcccatctcgtcgcgccgctgcggcatgatcactaagcgagaggccgaacgcctgtgcaagtcgttcctgggcgagcacaaaccacccaagctgcccgagaacttcgccttcgatgtggtgcacgagtgcgcgtggggctcgcgtggtagcttcatccctgcgcgttacaacagctctcgtgccaagtgcatcaagtgcggctactgcagcatgtacttctcgcccaacaagttcatcttccactcgcaccgaacacccgacgccaagtacacgcagcccgatgccgccaacttcaactcctggcgtcgtcacctcaaactcagtgacaagtcggccacagacgaactgagccatgcttgggaggacgtcaaggccatgtttaatggcggcacgcgcaagcggaccttctccctacaaggaggcggcggaggcggtgccaatggcgggtcgggtgggcaggggaagggtggtgctggcggcggtggcggcggtggcccagggtgcggtgcagagatggccccaggcccgccgccccacaaaagcctgcgctgtggcgaagatgaggctgccgggcctccggggccacctccaccccacccgcagcgcggacttggcctggcgactggagctagtggcccggcgggcccaggagggcccggtggcggcgccggcgtacgaagctacccggtgatcccggtgcccagcaaaggctttgggctcctgcaaaagctgcccccaccacttttcccccatccttacggcttccctacggccttcggcctatgccccaaaaaggacgacccggttttaggcgcgggcgagccaaagggcggtcctggcactgggagcggcggcggcggcgcggggacaggcgggggtgcggggggcccgggagccagccacttgcccccgggggcaggggcgggcccgggcggcggcgccatgttctgggggcatcaaccctccggggcagccaaggacgcagcggcagtggctgcagcggccgccgccgccactgtgtacccgacgtttcccatgttctggccagcagcaggcagcctcccggtaccgtcctaccccgctgctcagagccaagccaaggccgtggcggcagccgtggcggcggcagcggcggcggcagcggcagctgctggcagcggtgccccagagcccctggacggtgccgagccagccaaagagagtggcctcggcgcggaggagcgctgcccgagcgctctgtcccgcgggcccctggacgaagacggcacggacgaggcgctgccaccgcccctggccccgttgcccccgccgcccccgccgcccgcacgcaaaggctcctacgtgtcggccttccggccggtggtcaaggacaccgagagcatcgctaagctctacgggagcgcccgggaggcgtacggcgcggggcctgctcgggggccgggacccggcgctgggagcggcggctacgtgagcccggactttctgagcgagggcagctccagctacaattccgcctcgcccgacgtggacaccgcggacgagcccgaggtggacgtggaatccaaccgcttccccgacgacgaggacgcccaagaggagaccgagcccagcgcacccagcgcagggggcggcccagacggtgaacagcccactggacccccttccgccacctcctctggcgcggacggtcccgcaaactctcccgacggcggcagcccccgcccccggcgccgcctcgggccacccccagctggccggcccgcatttggggacttggcagccgaagacttggtgcggagacctgagaggagcccgccaagcggcggcggcggctacgagctgcgagagccttgcgggcccctaggaggccccgcgccggccaaggtgagccccgcgcccgccccgccagtggcgccttcccacctaccctgtgcgcggcagggctgcggggccgggcggagaacgggaattttgttccgcgcaggcgtgggagcagcaggcctcggccactctccgcaggcccagccttgggcgcgctgcgaaactgggcccacccgcaccctccagtgagggtttcgaagggaagggaagctgggggcggcgggaggactggggaacttgtgtgctttgtttttgttgatgggaatggggaggagaccggctgagactgccagacacagagacagaaaaggggtgtggagaaagaaagaggaggtaagaaaggaacccagagccagagaaaagcgctcgcccgggtgggcatcagagccccaaggaagaggagaagagaggacagtgtggcctctccctgagtcgggccccagcagtaccgggtccccggaatctcccaccaccccaactcgcagttttccgagtctcttcgcactcccgccttgggaaccacagggttcgttgctgggaagctgtctcgggaccgcgtgcggagcgggaggggggctctcaagctggcagggccggggcttgaggggcaggatgcagccaggctggagtcgttggccattttgaaagtgagtgcgcatacctgtacattcggttcattaaaacacgaatcattaaccggatgcgaaaggcgtcatttatgccgcggacggggcactggcgggagggaaaatgcctaaaaggaggcgggtgcagagggtggaggacactttgaacgcccctcggcttgggagccgctttgtgtttagagtaattttcccgagggcgctaacaattaccctgaatctacaagggggcaagggtgcgccgcgtgcgtcactgtgcccgctcaagtccagcgggcgcaccaacctttgccactccgtcggctttccctcttggccgcggggtagggctgggcgtctttgggccgccgcagggcgcccccctaatcgcctgtcatttctcggccgtcgcaggtgttcgcgcccgagagggatgagcacgtgaagagcgcggcggtggcgctggggcccgcggcctcctacgtctgcacccccgaggcccacggtaacgcctgtcgcggccgctggccactgtaatgggggaaccgcagacagagggccggggtcaaggaaggcctgcgaaggaagacaaggagagagacgcagagaaagagggagagggaaagaaaaataatgaaaacaaggaagctaagctagtactcccaacaacttccaatctttagttacttaaaaacaacagtgacaacgccctctccaccacacgcacacacatgctgcagtacacccagacacggcgttaaacccttaacaaaatcacgcccgacacggccttcaaatcctctcatttattcagcaagtgtgtttggccgcggggtcccctttggctaggccggatcggggcggaggatgggggcacatggccgcgcgcttgggtaccccagaagcgccagggtagctgaggcccatcgcggggtggtgggggccgccctgcacttgcgcgccttaccaggttcctcacagaggaggggttgggggcagcggaaaatcgggcaggtcgaggcagccgaaccccggacgatgtccccccacccaccccgaaggtcgcagcctgggccgcgttctcagcaggagtcgggcggacagacccggcggccacgcgcgctcgcggtgccccagtatctgcgcgcgatgtaggtcgctcgtccctggtgggctcggctgctcgcctagctcttttccaaggggctggggcgggggcctgaagcccggagatgagcagaccaggcgcgggggtggggggtgcccggcccaaagcctcagggcgcgctcctgggcgcacagccgggaaccagaggcggccacgacgcttttaattagggctggggcgccccgaccgcggcagctccggcagtatccgggtcacggtttctttgcctctcttgaaattcggtttgttgccttcaagagccagataaggaagacaatcactcgcccgccgatgatttggaaacgaggaaatcctatccagaccaaaggagtatctcccagccaagtcctgcaaatacagacagaggtgagccagcccttgaacccatcgctctccaccgcacccaggagctgggacccaggtcgcccaggttcccagaggcttgcgagaaaggcttttaatcaagtgtaagcggctgccagtcttcttcctcggcgagcagataaatatttaacgcgagcagggtgcaggccaggttttctgaattgctgcctccttggtgggtttgaggttctttcaggtaagggcagaggatgtactaaaaggaaatggagggacgtcctcacccacataaaataggtcaaagggcatttcctgcccttagatggcccatcttccctgggccgtctcctccaggggtcactctcctactctctactgtaatgtcctagaaggtggatagtactggattcctgtaactgtctcctctaaaggcagaaggtctagggtaggtccctgattcgatgtggttcctgggaagctcacccctcccctctcaagggctttcctaggacagaacccctcttacctgcccctgtatcccaggcgaagatgggcttaccttggatgtcacaggaactcatttggtggagaaagatatcgagaacctggccagaggtgaggataaatttgtgaaaaaggtgtacgctgtgcttgagagtgatgggtcattcctgtagaggggtgttatccctgtagggggtgagtgtggaaaagacactcaccaaggccttgggggcatgagttttcctttctttgggtggaaagtaagatcctctggacacattaccctggcacagaggtatgtatgtgtgggtagagcatgggagtaaaacaaacccccagaagtttattggaagtttgggttcccaaggcccgggtctgtctgaatagccttgccagaaagagaaatgagtaacgatgatcagaatttttgatgcctgtggacaatcagacaggacagtctgggtccgctgaattcaatggaaaacaggatttcaatgcaggattgcaggaaagcatttattttaggaatgtgagaggtgttttcctttctcctggcattgaggtataaccacctccaccttaccctaaatggagtgtggatggagcttgtttgcagaatggggatccctgtgttactgctcagcctgtaaggaggagactatggcttggggtgcagagtaggggagtccctagccccactttgcccttctaccttccattcttgcatttcagaggagcctctcctggaggagggcccagataccaatgacctcatggtcagggcagttgccacatctatccctctggagttggttctgagggcactaacagaggcctctacacctagctccctgcccctcaactagcccatagatggtcttgggaatttgtggcaggaggaagacaagcattggtggtcttccattcttcctagttacagatttacagaaaatgccattaccttcaaaatcactggtgctttatagtgagggttcttagcatggatttggcagtcttcagacctcctgaaattgtaggcaaactgttgtatgtgtatttttctgggaaaggtgtccaaggctctgaccaaagcctccctgatttatattgaaagggcggcggtgcgggggggggaggtcggggccggggcgggggcggggtctgtcacttgaagtgggaaatcaagtttccgtgggccagcctcttaggttagggagtgaggaacaacttaaagcagttgcccagctgcatagttcctggagccagggcctagattccaccgtcctgaatttattctcctgggcatcctacccacagcccagtttcttcacccaaatcctttgaatgcagttggtaaagccagagagcggagggcctccacctactggtcatccttctcaactctcctttcagggttgttggccaaggcagaacctgagctccaaataaccctgctttacctcccactttacctcccacttttcccctttcacagaggaattgcaaaaactgctcctggaacaaatggagctccgcaagaagctggaacgggaatttcagagtctcaaaggtacccactgccatcctgcctcaccccacctcatcaccgagccttccaccagggtgccccgacctactccgaaagccgggtgccaggcaactggtactaggtgccctgcaggagacaagaaactgtccttttccagggctgcaggcgaatggctgggtgggagttgcgggtaggggtgaaagggggggccaggagtgagaaagtggagccgggagagggggctgtgcgtaacagctctcacttaatcaatttgcacagataattttcaggatcaaatgaagagggaattggcttatcgagaagaaatggtgcaacagctgcaaattgtcagaggtaagacgggagtcaggtgagctcgtgcacgggccgtaactgcctctcgtctggcaggagccgcaatgttggctcagtcatttggatttaaattgaaggtaatttaacaattatttttttatttaatatgctttgtatactctgattagcctcagaatggcaagcgagcccagcaaacggcttgcaggcatcattacatggagtgattgaacttcttatcgcggcaatttccatggtttctaaattaaaaatcgaggcgtaaaattacctgggaagtaatgcctaagtttgctttaattttggttagatccatctgcctttaagcgccatcccaggccatttccttcctccgccagtctgcagttaggagctccggtaccccctcccccatccctggagttgtttctgcgcggagcttagccctggggagaggaggaagcccgggctgtgaccccggcctttcggagggtggtctgcgtttcctcactggcccctccccttgtcttccagataccctgtgtaacgaactcgaccaggagcggaaggcgcgctatgccatccagcagaaattgaaaggtgcggaagccgggaaacaaagataggaggggtgctgggtgccggccgtgctgtcgactgaatgaatgaatagtgggactagtgaggaaggccacgatccacgtggatcaggatctgtgagggagaaaagtgggaactgattttaacgggaagattattctaggatggtgggggtaaaaagaaagagccccttgggctttggacgtcagaaaaatctgccttctattaccaattctggctttgagcaggttgactcctctcttactgtgcctcagtttccttttctgtaaaatggggctactgaaccagagcagtggttctgaatcaccagcttttgtcctaccctcctgcctcctcctgatccgctcggttgagattccctgaccccaaagggttggtaaggccggggaggggaaagggtggactgcgcggtgaggtgagcctggagaggcgcccagagtgaccctcgcgactgtctccccagaagcccacgacgccctgcaccatttctcctgcaagatgctgacgccccgccactgcactggcaactgctccttcaagccaccgctgttgccctagggccggcctggccgcacccctgcgccctcaagccatgctgctccttgtaaatacccgctgctgcggtggccctgagcgaggaacaagccattcggacccgaccgatgtaaatacagccgcccgtccgcccgccttcctcccgggctccccggccttgcccgccccctcccgggcgtccctgtccagggccccggcttggtttccaagtgtaaataccgcctcgcgcctcaaatccccctaccccgtgtgaactctagggcatcggacctcaaggggttaactggacagacggggggcgggaggggagagcgccccctcccattgtatagccttgaacccgattgtgaatacaatgtagcaacttcgctggcgcctgccccgcactccccgtcccgtccacttctgaaactcctgttcctaatgacaaagtggctatgtgcaatggatataaatgtactgtgagtctctcggttcagtattaggttcactttaatttatttatgctgtaagttatttttgcttccttctcctggacccacttccagtcccgttttgcattcccctttggattttgctttggctattttttgttgtaacctcttgatgtaacagcactttaaaagggcgacaactgactcacgagatggcaaccacctggagcctgtttggggagaccaccctgtacccgtgactttcgtttttaataataataataataataataaaagatgtcacttctggggctacggaggtgggagtgcaccggcggagcggggcggcggaacaccgtgcaacaggtgggggtgggagccgccccgcgggttctggggctcccagggtcagaatcgggcctgctcaagtgggcagcagcgagcactcaacctctccactgtgccctccagacacactcagttttcccccacagggcactccctctccgcgtttaggaccctcccttgggcccgggatggaggaggggcattacgtcacggtccttagcgcagcggtcccgggctctttcctcaagagctcgaaggcgccgagggttcatccatgcccatttccacgcctgccacaccggggaagttacctccggggcgctcacagacagggcgccctgccgggaatcccaggttcaaccagaattgtccctttagatggcgcgggcaccgccggcctggcctggcctgggagcgctgcggcagggcggaggtctcagggagtaaggtggtctccgccgggcaggcttggaaaggaaggcgggacttggagagctcggtcacagacggcctcccgtctgccccgccgctacccgaaaggagggagccccgtccgcattttctgttcggtccattttagttcgagaggggctaaggactcgccgggcctcggctggggcgtccgacgtccgggtcacggttggcaaggcctcccagcggcctcagtttccacagcgcacctcctgcttgggctacagacgacgctgcaaattgcagaacactctttgcagggaggagagtgtggatggagtgggagagagctcacggcacagggaatcattcagccttggctttcatttctcgccctcggctggctagcgggggtcccgggttgagcccttcttttatctttcctgggtctccgtttcggcctctatgaaataacacgcaggcctccgtccatgcggctcgtagaaggcgggcggcaggccccgcgccaccggccagcagctcgggaccgggagccctgggctgagggggccgggaagtttcgtggcgggttgtcttggtgggccttggacggagccggctagtaggggcgtgctctgggcctccccgaagctgtgcagacgaggagtcccgctgcgcggtacagccaggaagccagtccctagagtcctttgcgctgggggtcggagccttggagtcccaggatgttccgagggctaagaccagagcggacacaaaggagataacaatgaagagggcgccggcaaatggcgaagcatcgcctccggacaggccatctccgggcagggcccctctagggagcgggaacgtttcatatgcatgggacccaccagatccgctttccgctggaccggtggcgaaactgaggtccagagaggaagagactggagtctccaggccgcgccagggcccgcggaactgcgacggggcgggacagcgcgggtgtgggagtttgccggcccctttccccaccgcggattgcacctttggaagctgcacttttcttctctgtaaaatgggcataaccattaccacccaggcaggaagttccgtggctgcggctcgacagaggagccaggcaaatgctccttcccacccttccttcccaactccccccaaagtggaaaagctcctaggcagctggggccctccggaagggacgccccatctgggcaggaatctctgcggactggagtcgtaggcggatccgacccagaaagctcagtcgcaaaaaccctcccgggcttcgcgtcccttcagaagtggtttgttccccccaaaaatgttaataaccaaacgattggtatggatgtaattatcaataattatactaattattgctgattgcggggctcgtagctactttaattagtttaccagattctaattaagttaaatgaaacattaatagggaaaatatgctttgaaaaaaaaaacccaggatttaaaaaaagtctatttctcgccacaatgttgccaccttgcgacagattttaagcattacagccaacgcccgaaggcccagaccagggtgcctggggtcccagggagaaaaagtggggcctggaagttggaggaggcagttgaacacagaatatcctgtgggctgttctcctggagtgtttggtttggcctggtccccagcggtgcctacaggaggtctggctctggagtcccaggtctggggtaagggacaagagtgcacggaagccggggcccctcttgggatccgcagtgggaagatgatctctatccccacctgttctggcaaatccagagtgagagactgagcaaagttggagccgccgttggagacagcatcaagtgggtttatttttcacccccacgggagaaagcagtaagtcccttcccatctccatttcctctgcaaatcagggtaacctgtgtgcaaaagcaccacttagaagaccccttaactcctggagcacaggtgactctgtgttctagtggcactcggttcatgaggctagcagggcactcacctccctttgttattcttggttgtaagtgtctgttgccctaagactgaaagtaagtccacagcaggggtcacaccttgcttttccttgcaatcttcaacacagggcccagggctccacaggcacacaacacatgtgtagatgaaaggcttccaactttgcggttcatctaggtgctgaaaatgtctgagggaaggaatccctaggtgcttctggacaacagccactgataagcaattaagctcatttgcataaggttaattaaacacaggtttactgctcagaaagaagatccttcatcaataggattcgttttgggagcaggtatcaggtaagtgattgttaacctagaaaaggaaaactttgttcctgttccaactgtgtcctaaagggggtattccttcactccgtcatacttttccaggtcactggcacacaggtccacccattcgtagctaccctgctctaaagccttgatccgttgcaaacatgtgactcctgccttgaattcagaacaccaacaaaagcagaactggatctgcatgctcttcccatgaattctaaacagcctcatctcctctctccatcctcagatgcttggctaagagcacaaactctggagccagatttactgaggtctcaatgctgccctgtcattgatgagtgacattgggcaagttgttgaatctctctgtgccttagcttcctcatctataacatagggagattaacagtacctacttcatagaactgttttctgttaatatatgtaaagcactgagaacagctcctggcatacaagaagtgctattgtattggtgtttgcaaagattacaactccctctgaattcactttcctgagactcaagccaggaatgcttttagagtcccaaaatgtaccccagtccatcaccctcctctcctccaggggcccagaaagggggcccagaaaggaggacaaaccggtgctttttcaagcctggactattgagctttctgaagacacattcataagaatctacaagcacagaggttggaagggcatcctgcaacgccaatgcatggactattgagtttctggagacacattcataagaatctagaagcacagaggttggaagggcatcctgcaacgccaatgcattgactctatgtgtccaaagaggcgaagacttgcccaagttccctcagcaggttagtgcagaggaaaggaagtcagccaggtctctggattttctggggctaggaactgcctgtctctttcctaatttctgttctaatcttttcttttcttttaagtagcgacagggcttcaccttgttggccagactggtctcgaacccctgacctcggtatcctcccagctcagcctcccaaagtactaggattacaggcgtgagccactgcgcccgaccagtttctttagaacaatctcaacagtcctttttgggccaagtccttcactcttggattctattttactccccataacacccccttccacatacgtagactaataatattccagtctgatgggttgtctgtgctgaaagagagggagccacatcgacattggtcgttttcttatttggcatcccaagggagacatttaaaactactcacccaattgcccaagtggcctccaaagaaccagatatctctaggggaagaacagaaatccagccaacaaagattgtcctctaacgccttacatcgaaggcccagagccaaggaagaggcggagatgtcccgcagtcccctatgctcggctgttacctggaaaggatcatttcacttccactgaagagaaaaggaatgagtcctgaatggaatgctgcccggcagctcccagcgcccgctggtagagtacccgccgctgtccctgggtggctccggggcttcgagcctaacagtcctcctgcggcgcgcctggaggctgggagctgtgcggccgctcccggcagatcgactgaggtcccagtggccgcagggcccacgtgcatgctgaagcactagcaaagcagttgcaccatttttctgttggaaagatatttcagaaaacattgcctaagtcatcgcaggaaatctgaacgtggttggactttgtttcctctttgtcttaccactcgggactgtgtttttgtaactcaattacctgagacctgggtcccgatcttttcagggtctgtgcctctgtaagtcttatcaggctttacctctcagtgattggtgtaaaatgatgacagtaaaacagtaaaacccacagggtggggctgtcaggaattttttaaacattattttatttttctgccccctcccccttttctttttttcttttattatttatttatttggtctggaatatttcaatgaaatattggtgaagcccttgacatatggtagatactcattaagtggtggctttttttttttttttgattcaaaggattctgtcactcttattgcaagttcctcatacgtttatcgttgcactagttcctgttatgtttcggagctgaaatggatcaactttggcaagacgaaatttccttaagtgtaaggtactgcaatactcaggattgtgcagagggaagcagaggcaagatgggaaagatcgcaaactagggcccgagggccagaggcaaaatgcaccgcagagatgaatctgcctaggccccacctccttctattccgtctcctaggactactacattttatttgtgttaaaagatatcacctgtagatgaaaggtgttttcagtggtaaaccgtgcaccggcgtataaacgtggtgtaaaaaaaaaaccaaacagaaaaacaacctgatgtaaaaacagaaaaacaacctgatgtaaaaatatggaacgcttcacgaatttgcgtgtcatccttgcgcaggggccatgctaatcttctctgtatcgttccaattttagtatatgtgctgccgaagcgagcacggtgtttcgtcctttccacaagatatataaagccaagaaatcgaaatactttcaagttacggtaagcatatgatagtccattttaaaacataattttaaaactgcaaactacccaagaaattattactttctacgtcacgtattttgtactaatatctttgtgtttacagtcaaattaattctaattatctctctaacagccttgtatcgtatatgcaaatatgaaggaatcatgggaaataggccctcttcctgcccgaccttggcgcgcgctcggcgcgcggtcacgctccgtcacgtggtgcgttttgcctgcgcgtctttccactggggccggggaggcgcggagggttcagacgcgggctcttactcaaacgctgatccccgaaactaccgagcagtgtctgcgcgacgcgaaagcatttttggagcgaggggccatggtgcccatgggattcccacgggtgttggactcgggaccccgaaaaggttgcgagtcgctggttggacccttccctgcgcggggacccgagagacgtgaccctagcgaggcctggggccacccactgtgggctggaaggggccgacaggggttgcggcgggggatcgtggggagggttggccagggcgcgccttcagcttcccctcggcttctcggaactagctctctgcattcggagccaaggcgatgagggtgtctgctttgggacgcaaacttccagtagtggtggaagtctgggaagggtcaccaccgtttgagccaacatttagaaagagccaggcgcttaacctaaatggtatcatttcccccattttgcagtttagcaaacaggctctgggaggttaaaccatctgctccagtgatcctgccactggttaaagtagttgggatttggatgcgagtctggtttcaaagacttttttttttttttacgcagtggagtttggaaaagatttgagaccacaagtgcagcctccgctttccttgttagagttactccagaagccctgaccagctcagactttccttcctacttccattccttcaacaaatattgaacatctgtggtgtcagcacccgggcttcagggatgcgtgagtgggcagggttgctatggtcatggagctcggttccagcaggggagccaggcagacatgaaagagccctctggatgccgagacgtgtgctgtgaaagtgtggcatagaaagtgcctgggggatgatggccacttcagtggggcaagagagaaggtgacattggagctgtcattgatgataacggcggcagcgctgaggggacggggaccgagatccaggcagaggaccttgcaaccacctgactcagtgtcacccatctgggccagcccttcccgggagaccactgtggtggtagttgctgctcccagcagtgctgtggctcagtactgagagaggggagggacctggggagccactgccagggagttcgggctttggaggcttgagttctccccactcggtacgcctcttaagtgaaatggaagtcatttgactagcttctcatctgaccttactaaataagcagtaggcaaacgcaaacctcagaatgctaatatggcctttactgagtgaaaagagctaatttggacaatgatgtttacctcagatttacaaaagagaattgcaaataaccaaaaagcacattaacatggatgggagatgatgctaatcttcaattagcatccacatttttattcatttatttagaacaggtagggctggtggtttcataaatgccttattgtggaaactagcatgagatacacctagttattggttcaacatttctggctacatgagcatgtgttactttgagccagaggtagattttttgttgttgtttgtttttttgagatggagtctcgatctgtcacccaggctggagtgcagtggtgcaatctcagctcactgcaacctctgcctcctgggttcaagcaattctcctgcctcagccaccatgccaggctaatttttgtattttcagtagagacggggtttcaccatgttagccaggctggtctggaactcctgacctcaggtgatccacccaccttggcttcccaaagtgctgggattacaggcgtgagccaccatgtctggactctttttttttgagatggagtctcactttgtcacccaggctggagtgcggtggtgtgatcttggctcactgcaatctctgcttcctgggttcaagagattctcctgcctccacctcccaagtagctgggactacaggctcactatcatgctgggctaatttttttttttttttttttttgagtcagagtctcgctctcttcagcaggctggagtgcagtggcatcatcttggctcactgcaacccctcctcccaggttcaagcgattcccctgcctcagactcctgagtagctggaactacaggtgtgtgccatcacccccggctaatatctgtgttttcagtagagacagggtttcgccatgttggctaggctggtctcaaactcctgacctcaagtgatctgcctgcctcagccttccaaagtgctgggattaaaggcgtgagccaccgcgccccgccaattttttgtctgttttttcttgttgagcaattttgcagaggagaaagatctgagttctagttctcattccacctggaactgtttgtgaccttggcctgctccctgtacctctctgtctctggttctgttttagcttctgcaaagtgaggaaactaccctagagatgatccttgacatttttcagcattgaaatgctggcattcttgcagctggataactgaaggacgtttttggataattgtaattttctgatattctgcattctcccagtaccatgaaaaaaaataataattagcaagatgtaaaaattcaagagggtttttgttttctctttgagaagggcgaagcaaactggtcatcctggagccatggagggccccaggatcagcccccaggggcggctgtggatctagggcctgggacctgctgaaccgtatcacaacatgcctctgagctccaaaggccagtacagacgaagcgggaggctggtgaaggggaggggatacattgaatgtagcatggaggtggaggagaggaggaagcatggaggggctcagggaggggagagccgagtggaccatgacttcatgggaagtcccaagcccccacaggccttgagggaataggcattgcaggcgaggagagtgtgggtgccagagaggactggactggtgggcaggcttggagttgcagtgggagccggctcctgccgccttcagagttgttggcttctcttcactctgcagtcctgaaaagaactgagtcctggcagtcttccctgaatgttctggactacagaaccccaagagatgaggagtggtccccctatcctgtttgaggtggtacttcccactacctgagtaggagagagcagagccaactttatttcgaacaattaagaaatgggctgtttcatatggaaaaaatgtcagtgaagacatgaactcttagcattctctaaaattatgtagtgtttctcttacagccagagagcattgcatgttttcgtgtatcattttatttgaagcaggaagggctggggactcccagcagccccaccggagggaaggagggaggaaggagcggggatgtggagagaggcccctgtgaccttgtttatgtgcaggcctgggaggaatggcattagtggtttcaggaggtgttgccctgggattgtagcacagggacaatgcgctgagttcacatgcctgaccctgaagctccaaaggcctcagacacagagcatggccagagcagggttggaggaggcctgagtgtgggggaggacccactcccccaggctgccagaaattcctgtgagctgcttatgctctgagttaagccttgttcttataacatctcttttgaagtgcactctgtcacctaattcacctcaatgtgaatgagtttttccaaagttaagctgaaggggggtggagtaggcaaatcggtctgtgtgcccacagctcagagggtggcctgggggaagagacagggtcagctgtggccagctgacctctcagagggagtttctttcaagacttgtaagcctggtgtgcccagagcccttgctctgctggggtggcccctggtgtgttgagatcagttctaatccatcccagatgccgggcctcagtggagccctctggtcccgcccctccccctgcatagcccaggctgccccttttactctcccccagatctcatatttgtgcccagaatgtcttaaaagatctgtttcctcacctgtgggatggtgattgtgctgcctgctttgcagggtcatttgaaggttaaatgcaggattgggtgtgaaaggccctagcacattggatgagctgattgatgccaagtgtttacaatagtcctgggctattctaatgctcaatacataaccacttacttattcttcttttccttcgtcttgcaactatctgcatgaaataaactttctttaaggtaaaaatagcagggtagggaggagtccctaagttttgctccttttagccacgacggggagtatttttgcccagatgtctttaatcctttggatttgagtttccaaaggccctggttaagatgcagttatgttttgagacgggacactacatagactcagtaatacctgtttacgtagcttagtacgattccttgccctttaagaccaacacagggtcttctggcatcctatttcatgtgagtatctctgagacataagcatgggggtgcaggggtagtgctggttattattcctcttttactgatagggaaaggcgaggcctacagaggttaggtgacctatctaaggacacagctagttagtgacggtcctggaatttgctctcggatctctctgactccgagggctcactttacacctacatgtaatatgggagtacagtttgaggggttctggagtgctttctccaaataatctcttactgctcttactcttgccttaaatcctgccactgatgcgtcattattttgagctgttgctgtatcgagggttcactgtaatttatttcatcaagacctttttttctggcagtcccaggatggcctaagggcataaggcgcttaggtttagggtgtggaggacttgctcagaaagaaggtgcaaaaagaggaattgccaagtctgagcatggggtctgccagcttctctctagctctcagtttccctgtatgggattgcaaggatgggaggaaaagtgtcacacctcctccaaatcctggctgccctggagtccagacatcgctccctgccaaggctacagtgaccgcagcagtggtacaggggaagactgcaatggctttcagccaagaaggtccatatttatgtctcatcaactgtgactaggtgggtcaccagtctcttccagttgctgaccctgttttctcgtctctaaaatggaagtgatgatttttctacttaccacacagggttgtgaggctccattgaaatgccactgtaaattgctatacaacaaaagacaggaatatcagtattgtcagacacccattggagcctcaggcagctcagcattccccttacctggtgagtgaggcatttgtgcattaggaacagacctacaaaatcagagcaccaaaatgaaacatcacactgtattaatattttcacaccacttagctctcattaaaatgtactttgctgaatttaatatgtgatttcaaatgacacaacatattaagtgcttaatatactagaaattatgaaactattatagttgatgccatatgaaataattacactgaattaaactttagcagccaagtgaaggaaagacttcaacttaaaacgtcttaaagaagcttaagccaccactgtaatccccaaaataaatgtccagaaattaggatctttaaataaaaactggaacttaatctgtacttacaccgggaagctcttctgggctttggtgatgtgcagcattgttcccttggggaggtgaggggccctgggacccactgcaggccagggtgttgggatcagggcttcagcgggctcgctccatgggcctggctgggggttggctcaaatggcctggagtaaagccttctaccgaagtgacagattagtctttgctcgagattagcctattgacaagttaaaaataaaaacaaacccaccttatggaacatctattcagtgcttcctttgtgccagccattttatatgcatttcctcatttaatcctcacaatacatctgttttaagagccactgtttttcagatgaggaaacaggctcagaaagattaaatgaataatccagggccttaaatcagaatccatagtgttcacccctgcatcagattgcctttctctaaactcttcaacctcctcattagtgtatgtgtatgcatgcatgtatgtactacctcctattttaataatgattcagtgactgatatggtttggctgtgtctccacccaaaatctcatcttgaattgtagtccccataatcctcacgtgtcaagagagagaccaggtggaggtaattgaatcatgggggcagttttctccatgctgttcttgtgatagtgagtgagttctcacgggatctgatggctttataagtgtttggtagtttctcctgcattcattctccttactgccgccttgtgaagaaggcgcttgcttcccctttgccttccaccatgattgtaagtttcctgaggcctccccagccatgcagaactgtgagtcaattaaacctctttataaattacctaatctcgggcagttctttatagcaatgtgaaaatggactaacacagtgaccaaacacattagcctgctatatgacagtgacattacctatatctttatctcattccagtcatggagactagggaccatggcttgagagtttcaccttaaactgtctcgatacactcagtctggctaacttagacaggaagagctctgtggatacttgctgttaattcaattaaagaaaaatgaattcattacctcctcagtatcctgacatattacctttgtgtgcttgcttaaataagatatcctcttataaagagcaaggatactttctatcatagggaataccagtgtcttagctacttaaggccctatgtctcaattacttatatcacatgaaaatacccaatgggctgtttgaaaaatataaattttagtgtggacatttaaatgtattatcatttactgaccagcaaaaatgattttcatagagacaggaaaatttggctcaaccaaacacatgtttgtaatgaactgaaaacatgtatttctcgttaagagtcaagattaggctctgttttgtatcatagaaaagcaaataacagtggctttaagatgatagaggtttatttctctttcacatgaaacaagttgtcttttaaggacttgtctggtagctccattgtggcagacagccaggctcttttatcctttagggccacaattcatggtccaagatgcttgctagagctccaagttccaagcaggaaaggcaagggggaggccattactgccccgagtaaaatccataactcagcataccacctaacactcaggagcactcagtacatggtactcttggctgttgctcatcttccgttctgcacaacaacaagaaggaggaagggaagtcatatttactaataccatacagggttctcaggaccatgctggacatttacacatgattgcattcaactttcataatccagtgagggtggtgtagcagcaggttaagtaggaagtgaggctgtatccacatgtggaggtaggaaattggaggggaagggtggaatgtttccataagaagccgaagggctttcaagaaggaagggatgaagcctccaacacttgctctctgagattcaagttaatacacattttcagtgtggatcaaatggtcctgacgaaggtgcagtggcaggaaagtgttaattatgctcttagaataaaattgccatgagcatagaaagtgaagagattaacaaattttaaaaagacattagaaaagctagcaaaagacttgaacaggtgcatcgcaaattaggagctccaaatggtgaatgtgaaaatgtcctcaacatctttaatcatcaggggaatacaaaaccacctcacaattaacactgagaagtctgataatgctgttaactaaaaactcaatcaatatataaatttggaaaggagagctttgtttcttataaagggttatagccagcaaggtggccattctgacaggctgggaagtgttagccttggtcgaagcccagaaacacacttcaagggagagagggaagggtaagacaggaatttaagctgaatggttggccaagtataggtattcaacaggatacaggaggagctatgaatattcatggaggtggtcctaatacatgcatacttgaataaacatgcatattacatatgacccatgttctctttgcagtggagacttttaaatgtaacatttaaatgtagtacagttaggttctatatgtcaaaaggtcttttcaggacacaaaggcactcaagtgtgcagtctctgtaaaccagccagaccagtccatggttggtggtcttctcatcaggagaaagttaactgaaataactcttgtccaatcaaagctgtagttatgtcttgtggaacagggggtcagttaggtagcatctggcgatggattgagttgcagattattttaatattgcttatttcaagggcagtgcttgtttagctgctggagaaaaagaaaaacattgtggcagttggaacagagttaattttttaagtgtaggggagcgtagtgacttaacccttgcattgcatggccttaggtgttgtttatagtttgatatagtcataaagagtccattctatcagtcttattatctctattttaacattaaagctgatcagttgggctggatgcagtggctcacacttgtaatcccagcactttgggaggctgaggtgagaggatcacttgagcccaggacttggaggctgcaagggaattatggtcatgcaacttcactccagactgggtgacagagtaagaccctgtctctaaaaaataaataaataaatacaatgctgctcagttattgtgtccagattgcaatatgacctcttgtctcgtcatgaccaggaactcagtttttaagtcctgttggccaagagtgggggctccattcagtcagttggggggcttagaattttatttttagtttacaatgccaagtgctgatgaggaagtagagcaaccaagatatgagaatatatgtctggggagtggggagattggtgcaaccactttggaaaatggcatactcctaaaattgaagataagtataccttatgactcagttgttcctttctagttacatgccctagagaaactcatgcatatgagcaccaagttacaggtaaaagaatgttcaaggtagcattgtctgtaatggtcccaaactggaaacaactcaagtgcccatcaacagaagaatggatatccacactgtggtatattcatgcaatagaatactatgcagtcatgaaaatgaatcaactacagttattaggttggcgcagaagaaattgtgtttttttgccattgaaagtaatggcaagaaccacaattacttttgcaccaaccaatacctccagtgttaggggctgaattatatcccccacttctacctccaaatttgtatgttgaaatcccaacccctagtactgtaaagtgtgaccatatttggagattgggtctttaaaggggtaattaaattaaaatgaggttattggatggaccctaatccaatatggctgatgtccttattagaagaggaaatctggacacagacatgcacagagaaaaggccatgtaaaaacagagaaaatgtagctgttgacaagccaaggagaggaccttaggggaaaccaaccctgccaacaccttgatcttgggcttctagcttccagaactgtgagagaattaatttctgctgtttaagccacccagtctgtggaactttgttaggcacccctaaccccccagcagactaacacaccagcaatgtggacagatcttgtaaacatgatactgagtggaagaaggcactaataacatatacagaactataccatttatataaagttcaaaattaggcaagaccaaactattgtttaaggtcgtatatacaaatggtaaaatgatgaaagcaaggaagttaccaaaaataagaaaatgggaggcgacacataaaggcttctgggagtggggggttggggtcgcctaacagttccacagactgggtggcttaaacagcagaaattaatttgcctgtttcttcacttgggtgctggttactcaggtgttctccctagagttgtgcactgaactgaacatttatgtgttgtgcacgttgcagtatttataataaaatgctgtaaaaggaagacagaagcaggtgggggaagaggagaagcagagagagaaggaacgaggagggggaaaaggagggaaaggaggaaggacgagaagcgggaggggaagaaataaatcagtgggctggcctcttaccaagtggtgtggtctaagagctgtgagaccacagctgtcagttaaaggtgggtcccaagctcaggtgctgcctctgagtgtgaacctgagcccagaatctctcccctagagaagggcttagaaactttgtaaccttgggaaagccagagtatttttctgagatttgtttctacatctttagaccggggaagataaacacctctcaataaatgtaaggctcttccttttactaattcaggtctctgctctcatgtcacctcctccaggaagccttccctaatgatcttttgaaaatagcacctcttggctgggtgaggtgggtatgcacctgtggtcccagctatttgggagcctgaggcaggacaatcgcctgagcccaggaggctggggttgctatgagtcatgattgcaccactgcactccagccttggcagcagagcgaaaccctgacaaaaaaaaaaaaaaaaaaaaaaaaaaaaggaaaaatagcaccttgatgtggcttggctctgtgtcctcacccaaatctcatctcaaattgtaatccccacatgttgtgagaggggcctgattggaggtgattggatcatgggcagacatcccccttgttattctcctaatagtgagtcagttctcatgagatctggttgtttgaaagtgtgtggcacttccccctttgctctcgctctctctcctgctctaccatggtcagatgtgcttgcttccccttcgccttccaccatgattgtaagtttcctgaggccttccagtcttgcttcctgttaagcctgcagaactgtgagtcagtaaaacttcttttcttcataaattatccagtttcagatagttttgttttgttttgagacagagtttccctctgtcgcccaagctgggagtgcagtggtgcaatcttggctcactgcaacctccacctcctgggttcaagtgattcttctgcctcagcctcctgagtagctgggattacaggcacccaccaccatgcctggctaatttttgtatttttagtagagatggggtttcaccatgttggccagactggtcttgatctcctgacctcaagtgatccacccaccttagcctcccaaagtgctaagattacaggcatgagccaccgtgtctggcctcaggtagttctttatagcactgtgaaatggactaagtacctcctttcattctttttccatttatttttctttacagtacttaatactgttgataagtatttatcactgaaattatgtcaagtatttgtgcatgaggaggagcaggatttttgttttgctccccattgtattcctagtgcctgaaacagtatctgacacatagtagatgctcaatacatatttgcagttagtttgggtgtgttggctcacatctgtaatcctagcactttgggaggccaaagcaggagaatcacttgaggtcagaagttcgagaccagcctggccaacatggcaaaaccctgtctctactaaaatacaaaaattagccagtgtagtggcacacgcctgtaatcccagctactccagaagctgaggcatgagaattacctgaacctaggaggcagaggctgcagtgagccaagattgtgccactgcactccagcctggaggacaagagcaagacttcgtctcaaaaaaaaaaaaaaaaaagaaaagaaaagaaaagaaaaaatttgctgttacaaacattagataataattttgtgatgccaggcacctgaggcactcaataaatgctcgttctctcctccccttttagctgagaacctcaccctcatttcctggagctggcagccccttatctttttccttcccccctccaacctgggactgagaaagtgcctacaactgacgcctctgatcagtagcaacatttcaccccctggggccaatctggcccatcatctgtcccctccccacacccttgccaagggtcacagtctccctgccccaggggagggtccctttccctcagaggggccgagctgcccctgggtgacccaggctccaagtgcttacagcactttgggtgcatggactgttgcctccattgataatttactgttgtgggcttagagtgaggccctgaaaacccgccataaaggtttctctcactccttcaccctcattaattgctcccgcctccctgttcttcccactcagatgcctatatttagtgctgattttcttctgccttgtttagagttagttgtttacttgtttgcttcccctgccacctcccagaccatgaacccagctgtgaggggccagactttattcattgctgtactcccagtgaagtggcaccattcgcctggggggatacctgaggttcattgtctcatgccagggaaatcaaggacatggacacacaaggagtgaggttgagagcggaggtttaatagaaggaggccaggcatggtggctcacacttgtaatcctagcactttgggaagccaaggtgggtggatcacgaagtcaaaaagatcgaaaccatcctggccaacatgatgaaatcccgtctctactaaaaatacaaaaattagctgggtgtggtggtgcacgactgtagtgccagctacaggctgaggcaggagaatcacttgaacacgggaggtggaggttgtagtgagctgagatcacacgactgcacttcagtctggtgacaaagtgagactccatctcaaaaaaaaaaaaaaaaaaaggcgaaagaaagagaaaacctttctcctacaaggagaggggtcctgagcaggtttccagtccacagtgaaatgcagggttttatagatgagcttgagaaggtagcgtctgatttacatagagcacgaaagagtgcttggaccaggtgtgccatttgcataaggcatgaaaaagtggttaggactaggtatgctatttgcatagtgtgtaaaagtctggccacccccaccctaatcttttattatgcagatgagctttctacctggctggcaccatgttgcctgttcctttactgtacacatggtgacaaaagggaagttgaagcctccatattgaacatacctggccctcaggtaacccttttctattggcacaggtgctggcattcgcccgtgcaagcttccagcttgcttatctgtttgcagctcgatttttcaggctgctctttgttagaaaagcaatgattttgggctgctttttgttgaaagggaatttctgccgaggactcttaccctcacgatctgcctgaataatttctttctgtctcctgtatcaccagcacctggcacagcacctgaattttaaatcttatttatttatttatttatttatagagacaagttcttgctctgtcgcctaggcgacactataacatcaacctcctggcctcaagtgatcctcccactttggcctcccaaagtgttgggattataggtgtgagccaccacacctggccttaatagacacatttttttctttaaagcttctgttacaaaggacagataagaggatttcaagagttaagatgaccacagatcaaacttccttgatgtgccatcttccaacttaaattcgaaagctacttgagacacagaaaaagacaaaaactgagaaccattcagaaaacttagtggtcagttgttggccagagtccaagatggaaatttccctaataacctgccactggggctgggggaagtcacatggtaggtggcctgtgcatactttgccctctaaagtggcccagaacctgcagacaggaagcttgcagggagaagcttaggccctcattcactgtacagggctgcactcaccagcaaatgggcagcacactcctaacactcaagtatggttttctgaggcagtcacttctgtccaccctcaccccttccgttagactgtctctgcctgtgtctgtggggacactgtggcactcagtacctctgagcagggagcagggcaggactgatgaggaggtggcctaaaaggcacgctcgcctaatgcagggaccctacagatggaaagagtgcggttttatttcaaaatatctgatacacagtaatatagataccttgtagtacttaaatcgtattaacccagtttgaaggtctttggcttttagtatcatgcgtttatttttatgttggcatgtttggttttatttcttttattttggtttatgccttctctttttcatgtttgtttttgtttttgccttctatgataagcaaaattgcatgatgatgtattttttatttatttattatttttttgagatggagtctagctctgttgctcaggctggagtgcagtggcacaatctcggctcactgcaacctccacctcccgggttcaagcgattctcctgccttagcctcccaagtagctgggattacaggcgcccaccaccatgcccagctaatttttgtatttttagtagagacagggtttcactgtgttggccagggtggtctcgaactcctgacctgatgatccgcccacctcggcctcccaaagtgctgggattacaagcgtgagccaccgcgcctggcccttttttttttttttttttttttttttttttaagacagaatctcgctatgttgcccaggctggagtgcagtggcgcgatctcagctcactgcaacctccgcctcctggattcaagtgattctcctgcctcagcctcctaagtagctgggattacaggcgcctgccaccgcgccctgcaatttttgtatttttagtagagacagggtttcaccatcttggccaggctggtcttgaactcctgaccttgtgatccacctgcctcagcctcccaaagtgctgggattacaggcatgagccaccgtgcccagccgatgatgtatttttttagagtcatggtctcgctatgttgccaggctggacttgaactcctggtctcaaatgattctccagtctcagcttcctgagtagctaggagtacaggtgcaccattgtacctggctgatgatttgtttttatcttctgtaatttgaaaagtatatagctatatagcctattgttttaattctgccaacaccttgaagatttttaaaaacttttttgaacccatgtagtatagtttggacttcccctccaaatctcatgttgagatgtaatccccaatgttggaggtggggtctggtgggaggtgtttgagtcatgggggtaaatcccttgatgctttcccggagatagtgagttctcatgagatctggttgttgtaaagtgtggcacctcccccacgctctctcttgctcgtgctctgccatgtgaaacagcagctctccctttgccatctcccaggagtaaaagtttcctgagaccttcccagaagccaaacagatgcctagcaccaggcttcctgtacactctgtagaaccatgagccatttaaacctcttttctttataaattacccagtctcaggtgtttctttacacaatgcaagaacatcctaacacaccatgtttctctatcagattgaaaataaatctaccatgtttgcctcccttccaatataaagtgagaagtttttcaggccctccttccatatctcttcattagaggcctaggttatcacacctctcttttttaaaatgatataggtcttctttttacaaaaaattggttttaaatttgggatccaaattttagccatgtttatcattatttatttgatactctgtgtttaaatggtttccacatttcctgcaggctccacttactatggctgcaaaacaaattagccccaaacagtggccaggtgcaatggctcgtgcctgtaatcccagcactttaggagaggccgaggaaggccaatcacttgaggccaggagttggagaccagcctggccaatatggcgaaacctcgtctctactaaaaacacaaaaattagccaggcaaggtggtgtgtgcctgtagtcccagctacttgggaggctgaggcaggagaattgcttgaacctggaaagcagaggttgcaatgagccaagattgcgccactgcactccagcctgggtgacagagagagactgtttcaaaaaataaaataggccaggtgcagcagctcatgcctgtaatcttagcaccttggcagcccgaggcaagtggatcacctgagatcaggagttcaagaccagcctggccaacatggtgaaaccctgtctctactaaaaatacaaaaattagctgggtgtggtggcacatgcctgtaatcccagctacttgggaggctgaaacaggagaattgcttgaacccgggaggcagaggttgtagtgagccgagaccacaccactgcactctagcctgggtcacagagtgagactgtctcaaaaaacataaaataaaaattaaaattaattatcctaaagcttaatgcttaaaacaataatcatttattacctcttgctctttctgtgcattacagtttagacaaggtataacagggatggcttatctctcctccaaaggagatgtgaaatgtctgaggcctcgcagtaaaactccaaagttgagcctctagcttgtctagaatcatctgaaggcttgcttacctgaagttggtgctggctgtcactcagctggaggcctcgctggggctattgaccagaacacccacacatggcctctggtgtgcctggtctccctcacaacatagtggctgagttccaaaggcaagcatctagagagagcgagccaggtggaagccattgccttttatgacctagcctcagaaatcattcagtgtcacttctgctgcatcctggtggttgggacaggtacaaagttctgcccaacttccatggaagtgtgtcaagatcactttgtaagatgaacatgtgcgggtgcccacatatgtacacacgtgtgtgcatgtatacacatgtacatgcatatgtatatgctgatatggtcatctttgaaaaaagaccatcagccatactgtatttccttaaattcttgattttcaacttatgtttcaggcagttgcagagtgtctttgagtaactttcaggaagattgcatgctatgagtctcaatgtgcagtatgtaaaacggccatcttctttcttattttaaaattcatagccaggtgcggtagctcacccctggaatcccagcacttgggaggccgaggcaagtagatcacctgaggtcagtctctactaaaaatataaaaattagctagggggtggggcgggaggagtgtaggaatggcacatgcctgtagtcctagctactgggaaggttgaggcaggagaactgcttgaacccagcaggtggaggttgcagtgagccgagatcacatcactgcacttcagcctaggcaacagagtgagactctgtctcaaaaaaaaaaaaaatcacaaggccagccatggtggttcaagcctgtaatcccagcactttgggagggcaaggtgagaggatcccttgaagccagtggatgctcaatgcacttgcctcctgcactgtggaagaagccagttttgtctccatttgcatatgcatttcaatcttcctgatctatatgtgtgtctgttctttgcattctcttttgaactggttgtaggctcctactgggtccctcattaataatgagttaaataaaatccagaacacatgtatattttaaatctgcatgagaatcataatcttttttgaaattatcctttaacattcctttcctgaaaagttgagaaacgatgtattcgacactatctatgacaatgtaacagccatgatttaatgatactgatggacagtagaatgtacatatgcagatatagtgtagttagaactacatttaatattaagaaaaaaacactcgaaaagataaaatgtgttgaattgtttaacatttttctttattatattttccaaaaatttaaaaacaggctgatgctaccttggtagagaaatccagtgaagctaaactctaagcctctgttttattgagggattagtaattttttttttttttttttgagacagagtctcactctgtcacccaggctggagtgcagtggcgtgacctcggctcactgcaacctctgcctcctgggttcacaccattctcctgactcagcctcccaggtagctgggaccacaggcacctgccaccacgcccggctaattttttttgtatttttagtagagatggggagtaattgttttatggttcttgaagggctgggaggggcttcctggtctctgcatgtcactggggtcagtgggagtgctgctggaaagtgagggaacatatgatgattaatagtaataataataataaatcagtacttgtaatgtcccaggaattgtgtcaagcagtatctcatttaacccttacaacagccctttgaagtagatactggtagatggtatttccattggctaggtgcggtggctcacgcctataatcccaggactttgggaggctgggatgggaggattgcttgagaccagcctggcaacctggtcagaccttgtctctacaaaaaataaaaaaaattaactgggcatggtggcatgcactcgtgtaattgcagctgctggggagcctgaggcaggaggatcctttgagcccaggaggtcaagattgatgtgagctgtgatcccaccactgcactccagcctgggtgacagagtgagaccctgtctcaaaaaaaaaaaaaaaaatggtatgcccattttacagatgaggaaactaaggttaggaaacttaagtgacttgcccaactagtatgtggtggaacccagactgagacatgggctcttaacccccctgctactgtgtgtcatgtgagaaatgttggagaggaagtcctgggatctcctcctgaagaaattgtccccactactggatccaagccctcagaatcaattcatccgtgaaacattcactgagcctcctctgtgttccaggccctgaggataaaacgtgatctgagtcttcaagtaactcaggagccagggtgaacagccagggacgggagtcggccaaaggaggggccttggcaggggtagggagggtgaggaggtgcttccaggaggtggcggcaacctgcttgagtcttaaaggacaggaagagccaggctggtaaaggggtgagggttgggaaaagggcattgagggcagaagggcttgagcacagaggggaaagaaacccctgagagacaccatcagcacactcatttcagctctgcggctcacctgcctccactgtccccgcttctgccgctgccctggttaccagaagtcgttttgttcagtgggaaggtgggcacaggtcactgctaggggtgggtacctgaacatgccaaccagagcctcctttttccaagatgtttgaacatgggtcagatggtctctctccagggcctgacggtgagaggtgcagcctgcagaaggccttagcagtgggtgtgcagggggcaccgtgagagtgggcagaccaggctgtctgagcaaggactcaacacacctctgaggtcccgctgcatgctcagcatgggtcccgggacacatgccagggccttcttaacacatttcttgtttcctttagattgtccaaattgggtttctgtcacctgtaaccaaagatccttgctgacacagcccctgagttggtcagactcaggagagggacatttaaactaagagaggctcacctatagatcaggaagccaactgactcatttcccgtgagaagtgtcacggctcagtgggtcagcctttcacatcattactgccggtgtctcctttccctggagaaaagccatctggattgacaactggcctcttggagcaggccccaggcccagcaaggatctatagctagaggcatcaagcaaggactgcccaagggtccaaaaactgtttctgttaaggtccagacagtgaatattgtagactttgcagtctctgttgaaaccattcaactctaccactgcagtgtgaaaacagccacagacagcacataaatacatgagcatagctgtgttccaataaaactttacttataaacattgaaatttgaatttcatacagttttcatgtgtcctgatgtattactctctcttttttcttttttgagacggagtcttgctctgttgcccaggctggagtgcagtggcgcaatctcagcttactgcaacctctgcctcctgagttcaagtgattctcctgcctcagcctcctgaatagctggaatgacaggcacacaccaccacacctagctaatttttgtatttttagtagagacagggttttgccatgttggccaggctggtctggaactactgacctcaggtgatccacccgcctcggcctcccaaagtgctaggattacaggcgtgggccacaatgcctggccaatatattactcttctttcaacttttttaagaacattaaagccattcttagctctcagaccaagcagaaaccagtggtgagggaccagatttagctttgcagcctgtagtctgcctgctgttggcctagggcatgaacacgtatgctgagaaagaagatggttgacaaggaggctggacaactgggtccatgggccaggccagggacacttctggggctgctatgcaggcttgtcactctagctgcttcttctctagccattcagatcaccctcttcagtctacaccctcctgaagaagaagctcaggacccatgagtgggcttaagtgcttggaaatgatgacatgtctagtcttgccttccaaaatttagccttggactgccttgatgcagccgctcctgacgcttctaggggcagctgtcctgcccctatcccctgtgaaaagcagattatgaaagcccactcatcccaccccacacaacccaggacccagaggccagggagagaataggctggctgcagccgctgactcatgccctggcatgaaggcatgaacttgttcgagagggatcttaaaagatacagtaggaagctgcagttacaagtgggctctgtggctgggtgtggtagctcacacctgtaatctcagcactttgggaggccgaggcaggtggatcacttgaggtcaggagttcaagaccagcctggccaatatggtgaaaacctatctttactaaaaatacaaaaaccagcaaggtgtggaggcatgtgcctgtagtcccagctactcgggagactgaggcaggagaattgcttgaacccgggaggtggaggttgcagtgagccgagattgtgccactgcactccagcctggggaacagagtgagactctatctcaaaaaaaaaaaaaaaaaaaagtgaactctgtgactggaaggttgagtagattcagggaccagggtagttgtaggaggccagatgtcagttgaagttgggggaatggagattggtggaagagataacagtgggtatcctggagacagagattgaccgactgactggctgaaagagagacagacacagcaggtgaatcccagacctgccttgtttctggcccttcctgaggcttgactagggggtcttcactgtaacttcatagcccccttcccctatacctggggtaatctgggtaatcccaatgcttctccaatacgttctatcaaaccagaagctgtggagcaggtaatttctttctatttatttatttttggattggtataaatttatgggatacaagtataattttgttacatgcacagaattcgtagtggtgatgtcaggctttcagggtatccatcacccaaataacatacattgtacccattaagtgaattctcatcatccatccccacatccccttctctgcgtccactatcattcatactcacacccatatgtatacattatttagttcccacttatgagtgagaacatgagtatttgtctttctgtgtctgacttttttcacctaacaacctccagttccatccatgctgctgcagaagacacaatttcattcatttttgtgtctgaacacgattccattgggtatacagatcatattttatttatccaatcatctgttgatggagacgtaggttgattccatgtcttggaggacgtcatttccgctgttggcggaactcatcctgagcttctgatcttactctccaagggaactctgcacttcatgttggggactttttgctgtcttggtgtctgcaggttggaatcttgcttcagccacaaaatttcacagttgggtggtctgggtctcacttccctcacctcttaaatggctgtcctgcatcatgcaccatttactatgacaatgttgacctttatctgagccctgtgcctccagaaggcagcgacgataaagttctccaacctctttaagttccaaggaaagagctaagccacaaaggaccaccttaagctcgcatcccaaggaaatacggatctccatcctttcttactattccctaagattcgctgatgactccattgtttacctgcctctctaaaaccccagtcccctttgagatgctcctcattaatgaacgttctccctattgcaatggcctgaatgaaatcttaactgtctggggcttttggcgttcacaatgaccataattgtgctattgtaagcgtcaatcgggggcgcagccggagtcccaggtcccagtcctggcttccccatgtcaggcttccccttcgggccggtttcaggtctcaattgggagctccctaagggcccctggcttagaatatgtgtgagtggcaacccagtccctcaacccctgcgcggggagccggggcagagcgaactgctgtaactttcgcacgccgccaccagagggcggcggctccgcggaggagggccccagcctctgcgccggctcgcgcccgcagtgcctttaaaacgtgcgttggaagtagacgccacgcagcctgctttccagagtcccggcgtttcccctcttccaccgctgcactccaggggcctcccttacgcgtccgcacgcggcgagtccttccactatgcagggcgcgccgcaggactcttgagtgggcgggaaggctggaaagccagcctggagcttctggtctctagtgctgtgcagggcacaaggtccctgcccctcccgcggccgctggcctctcttctccttaagccaggtcgaaggattcctgaggcagcgggaaatggggaggagggacaggagtcccaagaccactgtcttgggtgcgggatttaaccagtcacacccgtcagccccttggaacgtcacagtgttcccttaaagtgggcaagacaagaactgttgccccgtctgaaagtgggcaaacgggctcccaaagaaaaaagttgattaggagagctagtaaatggcagaattaggacaggaactcagttctcctaggcccagacttggagctcttggggtggggcagcacagagatggctgtctgcctggcgtaagtaaactggtcccttcagcagaaacgggcgctgcacatcctcttcccgcaggacggcgacccctggacatcaaaatgcagccacttttggactcaaattgtagagttcttttttgttgttgttgttatttatgtatgtatttatttattgagacggagtctcgctctgtcacccaggctggagtgcagtggcgcgatcttgtgtcactgcaacctccacctcccgggttcaagcaattctcttgcctcagcctcccgagtagctgggactacaggcgcccgccaccacgcctggctaacttttgtatttttagtcgagacggggtttcaccatgttgatcaggctggtctcggactcctgacctcgtgatccacccgcttcggcctcccaaagtgctgggattacaggcgtgagccaccgcacccggcccaaattgtagagttctatgtacagccacgtttccatgatctttttttgttgttgtttttgttttgtttttgtttgagacacagtctcactctgttgctcaggctggagtgcagtgatgcgatcttggctcgccgcaacgtccgcctcccaggttcaagtgattctcttgcctcagcctcctgagtagctgggattacaggcgcccaccaccacgcctggctaatttttgtatttttagtagagaggaggtttcaccatgttggccaggctgctctcgaactcccagcctcaagcgatccaccacctcggccttccaaagtgctgggattacaggtgtgagccactgcgcccggcgtgtttgctttttaaagtgcatatgtctacatacacattttagaggcaaatagaaatacaaaagccaaactgtccacagtggctgtctgtggcagttggagtagcagtaatggaaattgcattttctctgtattgtccaaaatattcactactagcatatataaatcagaaagaggagcaatgattcaggacttctgtttgacaaaatgataataataataattcctctttaaataattggaaaatacaggctggatgcagtggctcatgcctgtaatcctagcactttcggaggccgaggtgggaggatcccttgagcccgggagtttgaaaccagcctgggcaacatgtcaaaactccatctctacaaaataaaaaataaaaataaataaaaatgggaaaataaagagaatgaagaaaataaaattcatcagtaccccctgccaaatattggtatttttctttctggttggtttctttctctacaaaatgtgaataacggtattaactgtacaggaatgttgtgaggattgagtgagagaacgtatgtaatagttaacattccagaagtgttagctatttttatatgtaacaaaatcagcaccagactgtatctactgtttctgtgctgccgtcttcacagccaacattgcttcatgaacagtttcccattcaattatgctttttaaaattgtatttttagtgatagtacagtattttattacatttaagtacaatttatttaagttatcccctattgttaagcctttagattgtttccaatttttgctgttaaaataacagagagattaacatctttaaacatctacctttgtcagcatttctgattatttccttagatgaattttttagaggtaggattactgggacaaagggtgcaaatatttttcaggcttttgactcaggttaccaaattgcttcccagaaagatcttgccaatttacattcccacctgcagtgcgtgagaatgtctgccccacagcacacaaaggagggattttattttgggatgggtgagatttgagtctgttgctgaaccgaggaaaatgagccccccaagccccatagcgaggtagagtttaaacttcgggacagagaggggatgtcaaaacaggcaaagtccatgggagaaagggaggggatttggagcaggtttacagagattgtcttggatttaagaagggacaccttatgtttggagactgatggaaagaggtatgattgggtgtagacagaatcattgtaaggaggtaggtggattcaagaggctagtccctagtggctaccttttctcagtcaagtaggaggttgggtcatctatccaaaggtaataggtgagcctgagaaggggacttgaggagagaggtgcgaccctttaacttgaggacaataaaagagttgactgtccagttgagggtgatgactttgagtttgtcatggcaccattctgcagagctgtgggtactttctctacagcacgcagtcacctggggaaagaaaaagtcatacatattaatttaaaccaaatctttcaaaatgtggtcaacagtagaaaactatttttggggagctggagggattcatggtaatgaaaaacttgtgggtttctggagttgtaccgaactttcaaggatcagttaatttctatcttatataagttgttccagaaagttagaaaagaccaaagttgcccagatcattttatgaaaccaatataatcttgattccaaaatcagtaaggacaaagcaataaataaatgtattaagttcatttcacctatgaatgcatgtataaaaatcctggccagacacggtggcttacacctataatcccagcactctgggaggccaaggcaggcagatcacttgaggtcgggagttcaagaccagcctggccaacatggtgaaaccccgtctctactaaaaatacaaaaaattagctgggcatggtggcatgcacctgtaatattagctacttaggaggctgaggcaggagaaacgcttgagcctgggaggcagaggttgtagtgagccgagattgctccattgcactccagcctgggcaacagagcgagactctgttaaaaaaaaaaaaagaatcttaaataaaatagcaactaatctagttatatgttttttgaaagtaggtttatcccaggaattccagctcaacattgaaaatcaccccactttaataaaggacaaaaatcacatgaaaaaaatcacatgagtatctcaaatggtgaagaaaaagcagcatattgataaagtttttcacctattttttatttatgaataactcagcatatgacttccttgaacttatgaaaatgaaaaaaaaaaaaaaacttagcaaactggaaataggaaaggtgtgtttaatttgataaaggttatatagggccaggtgcagtggctaacacttgtagtcccagcactgtgggaggccaaggcaggaggattgcttgagcccaggagttcgagactagcttggacaacatagtgagaccccatttctaccaaaaatacaataattagccaggggtggtggcacatgcctatagtcctaactacttgggaggctgaggtgggaggatggcttgagcctcagaggtcgaggctgcagtgagccatgattacaccacttcactccagcctgggagacacagcacgaccctgtctcagaaaaaactggttatatagcaaaaacttaaagcaaacactacacttaatgaagaaactaggagcattcactttaacatctggaacaaaataaggcatccaactgtactgctatcatttactatataataatagaagttccagacaaagctatgaatgaagaaaaatgtaagacatacaggatgagaagaaataaaattgtcactatgtgaagatattttcatttgtcttgaaaagcaaagagaatcagcatagacttttaaaattaagataattcagtcatttagtagatagaagattgaccaaaaataaatccttaacatttgtcttcaccacaaacaacatctattcacaacagcaacgacaaagtataaaaaaatctagtaatgtacttaattaaaaatatctatggagaaaacatgaaaatgctaattaaggatgtagaaaataacctgactaaatggagagaaattttatgttcttggatgaaatgattgaatattatataggaatcagatctttatgagttaatctataagttcaatggaatcccaataaaaattctagctctattttccaggaacttgataaactcactctcaaatttgtgtggacaaacaggactaagtcaaccttaaaaaaataaagagctagaatttgtcctaccagatattaagcacactacaaagctatgtcaaaccaaaccaaatcaaacaacattgttttggcaccaaaacagaccaatagaccatggaatggaatagaaaactgaaagtcagaccattagcatacaggtgggagacatcacaaatcaatgaagaaagcagattaaacccgttcgctatgtggggggaaaatctagaatccctgccttacaccaaagggaaaggtatatgctgtgtggtgttctgatatatatattggttttcgtccatatattggctcctaactcccatagcccttgttacagtcttgttagaatgttcagtgtgtgaggcctcaggaaacacaatctctcttctgccctcctttcacctgccccaaggcagacatctaatctatccccacttttctgattgtgggtcttaagaccctccctgagcggattccacctcataccctgaggggcaagaatgtttccataaaaatccaagaggactgggttcagagagatccagatagctgaacacatgcaggctgacaggaagaacgcattcatgggcctggagggtggtgtaccccaactccatggggacagaagctcctgtgctggagacccttccagaactcgctagaggtctcttcatctggctgtttatttgtatcctttaaaatatcctccttagtaaactggtaaatgtgtttccctgagttccgtgagctgctctagcaaattaatcaagcctaaagagacgggcgtgggaaccccaacttgaagtcagttggtccgaagttctgaggcctagagttgtggctgcggggaaggagggagaagtcttgggaactgagccctcaacctgtgggatctgacactatctccaggtagatagtatcagatatgaattggaagacaccagccaggtgtctgctgcttggtggtgggggaaacccacacacatctggtcacaggaggttctgtgttgatgattgttgctgtgtgatgtaaaacactaagtgatgtaaaactttaaggtgagaaataaaaccaaagttaatagaagaaaatataagggactatctttgaaacttgggctgggagagggactcattaaacagaacttcaaaggcacaaacccaaaggcaaaaaatgcattaatttgatgacatccaaattaactatttccatacaaaagaggatactatggacaataggtgacagaataggtgaagatatctgtaaatctaaaaatgataagggattaatacacagaatatgcaagtaccattgacacaggcttttattctcagtcactttgcaagccaggaacctctggctggcaatgccccacccaggcctcccttgaccacactacctgttgcaggagatggcctgcccacttggcccacccatgctgagtatggcttgcacacctgttcctgagttcttgtcctgtgcccaagaagaatgaggatgcactgacagtcaaagaatgagcaaggcagggaattttattgagtgatgaaacagctttcagcagagaggggatgcaggggtggtccgcctacccgaaggctggaaagtccccataatatgactaagtccggggctttttacaagctcagaatgggggaggggcaggccacaggtagtattggaaaaagcaacattctattggttaaaaggcattcagaaagaatcagttgggaaagggaggcaaaaagaacagaagttctcattctgggttgcagtttcatccaggaccagcagtccaatctttcagccttcaggctgtttttggctttaggtggggtttcaccggggacctgcccctgtctgcctaggctgccccctgttgctgtcactgtcatccctccatatccattggggatgggttctacgctccccctcaggtaccaaaatccaggactgctcaagttccttattaaaaatggcgtagtatttgcacaaaacttgtgcgcaacgtcctggatactttaaatcatctctagattgcttatagtatctaatataacgtaaatgctatgtaaatagttgttatactgtgtgttttttaagtcattgtattgttgttgttgagacaaggtctcactctgtccctacaagaaatttaaaaattagctggggctgggtgcagtggctcacgcctgtaatcccagcactttggtaggctgaggtgagtgaatcatttgagatcaggagtttgagaccagcctgaccaacatggtgaaacccaaattagccaggtgtagtggtgggcgcctgtaatcccagggactcgggagggtgaggtatgagaattgcttgagcctgggaggtggaggttacagtgatctgagatcatgccagtgcactccagcctggttgacagaatgagactccatctcaaagtaaataaaaattagatgggcatggtggtgtgtgcctgtagatctaactatttgagtggctgaggtaggaggatttcttgagcccaggagatcaaggctgcagtgagctgtgattgagccactgcactctagcctgggtgacagagcaagaccctatctcagaaaaaaaaaagactcaattatattgttgtgtaaaatatacccactttaaatataaagatccatatagactaaaagtaaagagatggagaaggataagaaagatataccatgctaacactaatcaaagaaagctggagtaggtatattcagacagagcagacttcagagcaagcaaattaaacagggataggaggggcattacataatgacaaaggggttgattctccaggaagacataatctttaatgggtatgcccctaacaacagagcatcaaaatacatgaggcaaaaactgatagaactgcaaggagaaatagatgaattcattattttagttggagacttcaatacccctttgttgaaaatggactgatccagcagtcagaaaatcagtaaggacatagttgaactcaacagcaccatcaatcaacaggatataattgacatctatagactacttcatccaaaacagcataatacacattcctcacatgtaccgttcaccaaagtagaccacattctgggccacaacctgcaccctacctaatttaaaggaacagaaatattacaatgtatgctctcagactacaatgggattaaacagaaagatagctggaaaatcccccaaatacttggagactaaacaacatacttctaaatgacatatggctgaaaaagaaatctcaagagaaaccaaaaactatttgcaactaaatgaaaatgaaaactcaaattatcaaaatttgagggatgcagtaaaagtgcttagagggatatttatgacattgaatgcatatattagaaaaaagttctaaaattataattcaagctttcatcttagaaaaagaacaacaaattaaatgcaaggcaaggaaaaggtagcagatcccatagaagaatggacagtttatcaagagaaaacttataaaagtggtaacccaaacaggcaagttaagggaattattaaaaattaaaatcattagtaatcaaagaaattcaattttaaacaacaatgaaatatcagccttacacctagaagactggcaaaaattggaaagttggaaaatgtcaagtgttagcaggtaagtggagatatagtttccttcacatgctgctggtgggaatgcagattgtcaaccattctggagagcagtctgatacattagatatactagataaattaaatatatgcacagcctgggacccagcagatctactcctgggtgtatatacactcaggataagtaatcatacaggtccatcagggaatacagattagaacattggctgctgtgtcagttctgctagcaggcaattggagacaagcagttgtccatctggagaggaataaatgggtgaaatgtgaatgatgcatgtagtagagtgctttagtctgttttatgctgctgtaacagataccacagattggatgatttgcaatgagccaagatttatttcttacatttctggagatgggaagttcaagatcatggtgccggcatctggcaagagccttcttgctgctgtatcataagatggcagaaagcatcagatggcagtagagcaaagagagggttagagagggccaaattcactctttatctttcatttttatttttttgagacaaggttttgttctgtcacccaggctagagtgcagtggcatgataatagctgactgcagtcttgaactcctaggctcaagggatcctcccacctcagcctcccgagtagctgggaccacaggtgtacaccaccacacccagctaattttttttttttttttttttttttgtagagatggggtctcacaatgttcctcaggctggtttcgaactcttgggctcaagcaattctcccacctcagcctcccagagtgttgagattataggcatgagccactgtgcctagcccctaaacttgaactcttgggctcaagcaattctcctgccacagcctcccagagtgttgagactttggattgtctgtaatgctcatgcattacaggcatgagccactgtgcctagcccctaaactcactcttttataatagcaccaatcccactcatgagatggaagctgtcaagttcttaaaagtcccacctcttaatactgctacaatagcaattaaatttcaaaataagttttggaggggacaaactttcaaaccatagcagatgtatacatagcaacatgaatgaatcttaaaaacagccctcagtgacaaaggtaggaagcataatgagataacttgataccatttataaattaaagtagatgcacatatttttgtaatttattgtatatgttaccaattttaaaaatgcatacacacaaaacttgaaatggatcataagcctaaatctggaagctgaaactgtaaaacttcaaggagaaaacatgggaaaatcttatgatttgaggttaggcaaagattttaggattaaaaaagcatgaatgaaaaaagaaaaatgaatgaattggcatcatcaaaattaaaagcatctgcttttcaaaaggcaccatcaagaaaatgaaaagacaaactgtagcttgagaaaaaatatttgcaaaacacacaaatgataaagggttttgtgacagtcatcaacttattgcttcttggctccaaattcacccttctttacctgctctgtgataatggaggtgggttaaataaatatttttctttgatacatgatgttaagccagtagtaggcatgggaggaggaagaaattgtctcttactctttcccttttcctgaaaagggcagcttctccagctcccagttctggcagtgcatggtaaccttcagtgcccagctgacagaagcttccctcagcatcttctctaagtggtgtgccactggcaaggcacctgaccatgaacggcttcccccagcaccccatcacctgaagaatttgcagcaagtttcaaggtatggcacttctctgtggacaacaccccctagtaccctaaagggaagattccactattacactgtgagccacttcagtgtcttctccaccacccaggatgccatgctgtgctctccccagcagggtctggagttcttccttggacactctatcctgctggcagcggctgttccctgtatttgccattcttgcattcatcagagttctctataactcttatgagtcgatttcccattactcaaatctcctgttatttctttatgttaaactttacctgttttccatttcttgattggacagtgataccaaattctatccagaatatatacagaaacctcccaactcaataataaataaaaacactgacttaaaattgaacaaaagatttagagctgtttaccaaataagatataaaacaaacactaacttaaaaataagatataaaacaaaagatttaaagctacttcgccaaataagatataagcacataaaaagattctcaacataattagtcaatagagaattgcatattaaaaccacaatgagataccattaacatcacaaaatgctcaaattttaaaatcttgacaatacaagctgaggatgtagagcaactgaagctcttatttctttttctttttacctttccttttttcttccctgggatggatcctgagcaactagaacacttatatattgctgatggaaatgcaaaatgggacatcggtttggcaatttccgataaagttaaatatatactgatgtatatatctcattgttttaatatgcaattccttaatgacaaataatgttgagcattttgttgttgttgttgttgttgctgtttgacagagtcttgctctgttgcccaggttagtgcactggtgcaatcacagctcactgcagcctcgatctcccaggctcaagtgatcctcctgcctcagcctctcaagtaactgggactacaagagtttgctaccacaccagctaattcttaacttttttgtagagacggggactcgctctgttgcccaggtgggtctcaaactcctgggctcaagtgatcctcctcggcctcccaaagtgctgagattacagacgtgagccaaccccacccagacatttttaaatgcttatttgccatctgtttatcttatttgttgagatatctgttcagatgatccattttaaaattggtttctttgtttttgttgagttttaagagttcactgtatgttttggatacaagtactttatcagatacatgttttataaataatttctctggtctgtgactttttcattctcttaacagtgtcttgtgcagagcagaagttattaattttaataaagtttgacatcaatttttctttcatgaatcatgcttttggtgttgtatctgaaaattcatagccaaatccaaagtcatctagtctttctcctttcttcttctagaagttttatagctctgcattttatattaaggcctatgacccattttgaattaatttttgtgaaaggtctaaagtttgtttctggatccttttttttttttttttttttttgcatatggtgattccagagcaatttgttgaaaagattaaccttttcctattgaattgcctttgctcctttgtcaaagattggttggctattactgaatgtaaattataccttaataaattaacataagaaatacatattttccaaaaatacaaaaacatttactgtaaacatagtaaagtggttgccaaggtatatgagagagtgtgtaatatgaatataaaagagaatgggctgggctcacgcctgtaatctcagtactttgggaggccgaggcgtcgaatcacctgaggtcaggagttcgagactatcctggccaacatggtgaaatcctgtctctactaaaaatacaaaaattagctgggcatggtggcacatgcctgtagtcccagctactcgggaggctgaggcaggnnnnnnnnnnnnnnnnnnnngaaagaggcaggggaatagacgaaatgttcgttagtaggaaaaggaaagaaatagtacgtttgggaggtggcgtgggtgtcagttcggccccaggaagcagagggcaggtttgtgtgtgtggaggcagagggcgggggcctgggaataggtaggggtgatgacaccaacgcgccggaaccgagggcctgatcgaagggacatggcagaaaaggaaaagaaagggaatgaataccgggatggaaacaagtgaggggccttgcacgcaattataattttttttttttttttttttttttttgagacggagtctcgctcgtcacccaggctggagtgcagtggcgcaatctcggttcactgcaagctctgcctcccagattcacgccattctcctgcctcagccttccaagtagctgggactacaggcgcccgccaccacgcgtggctaattttttgtatttttagtagagacggggtttcactgtgttagccaggatgatctcgatctcctgacctcacctcatgatctgcccgcctcggcctcccaaagtgctgggattacaggcgtgagccactgcgcccggccgtctttattcttaatctaatcgggcaacatgtaacctaacgaaaatatcagtgttcctctaggatacatatttctttgtagctgtaccttagcaatccatctccatgtgggatagtataattttttgtttctttgcttgttttgcttgggagcagtatggtaaacatcttggacttagagcagaataaatatgtaatttatcacacatactgttactcagaagtccagatttggtcttctttagtgtccattttgaattgcagctgattctattactagttttattagaatttgttgatgatgtgctgattttcttttgtttatcggcccttttcaccccagcaacttacatggtgaatgacattcatacacaaggcacattctcctggccataaccatttttttgtggaatattaaacattttatggagaagtaaggtgaatagcccctcagattttttttggcatgagatttatcaaagcattttataaacatattagtggtgtaaaatcagccctttaaagaacttttaaaagctctgtcattttataagaaaaagtacacaaatataaccaatctaattttttaaaacataaagctttatttaaattaaaattttttaaacaagtttaacatttttccatgtctttctaatacaatagataacatcaggaaaggaacaagtatgcactgttgcagaataaacatgaattaatcttattttactatttaaaacgataacagaatttatgtatatatatcaatatgactatgattatgagaaatagcacttaaccatcagtttctctccttttgatttggtaatcattgctgttgtgtggtttataacagaaattatccctgggtcatgctctctcctgtgtctcctagacgtggatgtagtctttgtgtctgagttgtctcccctgcctctttccatattaagaattcatctatgggtacgattaacaagaaaattaaagtaagtataaaaatcatgctgggcacagtgcctcacacctgtaatcccagcactttgggagaccaagctgagaggatcaggattgcttgagttcaggagtttgagactagcctgggcaacatagtgagacctggtctctacaaaaaaaaaaaaaaaaaaaaaaaaatcaaaaaatttgctgggcatggtggcatatgtattttttagtcccagctaatcaggaggctgaagtgggaggatggcttgaacccaggagatcgaggctgcagagagctgtgattgtgccactgcactccagcctgggtgacagagcaaaatattgtctcaaaaaataaatacataaatttaaaaaaataaaaatcatgactcccaggcagcaagtttttaaatttatttgtggtgcaactgtcaggggtactagccactagctgaagcagagataagttgtgggtcaggtgaaagtctgggtacctcattgtaccagccatatctctgcttctccagaaagcagatggtaattcaagggagtgagagtgccttattatatttgaatgcactctaatttttcacagttagtgatatggtttaggtctgtgtccctgcccaaatctcaagtccaattgtaatccccaaagttggagatggggcatggtaggaggtgattggatcatgggggtggatttcttctttggcgctgttctcatgatagtgagtaagttaatgtgagatctgattttttttttttttttttgagacggagtcttgctctgtcacccaggctggagtgcagtggtgcaatctcagctcactgcaacctctgccccctgggttcaagtgattctcctgcctcagcctcctgagtagctggcgtgcaccactatgcctggctaatttttttgcatttttagtagagacatggtttcactatgttggtcaggctggttttgaacttttgacttcgtgatctgcccgcctcagcctcccaaagtgcatctacactcccaaagtgcaaattagccggccgtagtggagcatgtctgtggtcccagctacttgggaggctgaggcaggaggatcccctgagctggagaagtcaaggctgcagtaagctgagatcataccactgcactccagcctgagtgacagtgtgagaccccaactcaaaaaaaaaaaacagaaaaacccattacagacacagtgaaaatttccttaaaacacatcccccctccattattgaggtatagcatagatggttaatttatttttaacaaatactgttcaaaattcagttactgaagcacaatttatgatttatttcttgagacaactttgcctttgatgatgacataacaaggtgttgttatgtcatccaacagcaggactgttggaaaatgtatttctcaaaccatcaaattcatgaaggaaacagtctcttttgattttccctattgaaatataacttcaccagaccaatctggttcaactgtaacaaaggttaagtaacctgagcatacccagtgtgcatgaaccaagcgtgcaatcaccagaggaacctaagtgctcaaacccaaggagcggggagtgaattaagaagtggacaccacatggcaggatccaggatccaatcagatcaatccctgctgtcacctcatggcaggatccagtcagatcatgcctcccagcatcacttcattgcaagatccaatcagataacaccttattaccctatacttataaaacccagcccaggcccccagcttgggggagacagatgagcattttcccatctccttgccagttgactcaataaacctttcttgctgcaaaaactcagtccttcagtgtttgcctttccattgcatgagggcaaatggacctggtttggtgatgtaatatgtcatttccacactttttttgttgaatatataaatgtaaattcagcattcaaaaatataaaagactacaaatgaaaagcaagtttcttgtccagtgttgtcctgaaatcactcataatttgtcctcccaggaggcagctaagactacagtttcttgtgtgtacttccagagatattttatgtattcaatgaattttcacaatataagtatctctcataaaacagaaacgcaactatcctggcttaaccaagcaggagtttggatttctctaatgagaggtctggggtgggtgtagcgtctccactgtatcatcaatgtcccggcttctatccatgtttctactcagttacgcttaatgtaactgagtagttacgttatcttgcttattaagtcttacggtcacggtcacgagttgactgctccaccttcactctcacatctgcgtctcagaaatgaagaagtagcagggaagagggaaaggtggttcctgtattaaagcagaaatgtcctcagatctccagctgtctcccatttatatctctgtggccacagtggtgtcacatagccacttggagggagcctggggagtgaactattttatctaggcccattccactctcaacaaaatttctcttagtaaagaatgacagcaaataattgcatactatatattaatcctaccttgcttttttcacttacctactgtatgtgactcagcatacgtgtccttctcagataacaatcaatgtcatttatttatttatttcaatttgtcatttatttatttatttcaatgccatttatttatttatttgagatgtggtctcactctatcacccaggctggagtgcagtgacacgatcatggctcactgcagcctcgacctcctgggctgaagcaatcctcccacctcatccccccaagtagctgagatgacaggcacatgccactaagcccagctaatttttgtattttttgtgcagacagggttgtgtcatgttgcccaggctggtctcaaactcctgggctcaagtgatccacctgccttggcctcccaaagtgttgggattataggtgtgagccatagtgtctggccccatttatttcttcattcatttaacataagaatctgttgctaatttatgtagtggagagtaactgccttatatctgtttctgctgggtttttttttttgttttaagacagggtctcgctctgttgtccaggctagagtgcagtcacacaatcatggctcactacaaccttaacctcccaggctcaagtgatcctcctgcctcagcctcatgagtagctgggactacaggcatgcatcaccattctgggctatttttttttttttttaaatcaagacagggtctcattatgttgcccaggctggtttcaaactctggagctcgagtgatcctcccaccttggcctcccaaagtattgagattacaggcaggagctatcatgcccagcctgtttctgctgtttttagaacacagattattaactggacacaggcacccagaataagactaaatttccaagcatgcttctgactaggtgtggccatgtgtctaagttctcgcctatgggatgagaacagaagtaaaatgtgcctttgaagaggatgtgtgccttctccttcctcttttttcccttcctgctggctgcattgtgcacttggcattgctccatcatgcagatgagaggttgtatgtaacagcagccaaaactacatcctgactaatacctgtgttaatgggccagacactgcactaggggctcaggacacaaaaaccaatacaattaaatttctacattccaggagctcaaaatcttgggtagaagaccaaagggtaagcaaacacttttgaagtcagcactgtggtagccccagggcctctggagcacggcatagccaatcacctaccatgtctatctatccatttgtgcatctctttagccatccgtgcatttcttaatttacccacctacccatagatcagttcctctctcatctatctgttcatgcttgcatttattcatccatctctcccacatatctcatgaggatcctgcagggtttttgttgttgttgttttatgagacaaggtctcactctgtcacctaggctggagtgcagtggtgtgatcatggctcactgcagccttgaccttctgggttcaagtgatcctcccatctcagccccctgactagctgggaccacaggtgcatgccactgcacgggcctaatttttaaaatgttttgtagagatcaggactcaccatgttgctcaggctgatcttgaactcctggcctcaagtaatccttctgcctcagcctcccaaagtgctgggattacaggcatgagccaccataccaagcctctgcagttatttttgttgagaattatatagggcccgttcaattgtatttttctcaaattcaagccaatcagaatggcacctttcacctcaattttaacagataccaggaaccaagatcaccacacacacgcaatataatgatgaaatttcatgttcaaatcacataactaaatgctgatttgtgaacatttttagattttcctaggtgataaaaatgatacagtcattagtttttttcaaggacagtctcccacttctcctgagttggatgtgccaccagcccaccttagagccagccctggggaaatgcagagggagacagagggcaaattcggtgtttgttataatcatgtgtgatgctatgtaagagctatctttagctgtgtacctcccttattcttgaggggtagagtaaggtggggtgaccaccaaaggaagccagcaggcttcgttcgcctccagggaatgagattccttgtctccctctctttcttactttggccactgaaatttctccaaaactcttcttaggaataaagaaaaaatcaagggtgcagattatggcaagaacatagttaaggtatgcagttttgtttcatttaatgagaaaatatagtggttgtgttaagaaattaaatggctcacacattgatcctcattgatatatattgaatgttgtttatcaaaaacattgtgaatttatttggtttaaaacaaatatcaaacttcaaatcaaacttaagtagtaagtctaatattaatggagatgaactaggattcgaactgagcaaggagggggaagggatggaggaaggaggactttttctgtttaaaatctaaggagccctggaacttacagaaattcagccctgtttttggtactagggagatacaaagatcagatctcttctgcccctgcttgtaaggcaggaaattttctgtctacttaagtagatgagacacaaatctgcaaagtcatatagcagaacaggaagctactgtcaagagatgttacaaaggggcgggggagagtagggagttgaggtggcgggtaaggatatgccaagtgtcaagtagatagtgcaggaaagaaatgcacatttctccaagggggtggtatccacaatgggttggaatggccagggaagctattctctccccttcccttccttccttccagttctaggcattgggggatacagtggtgaagaaaacagaaagaaatcctgcccttctggaatttacattctaatgggggcaagacagacaacaaatgaaataaatacaaataacagtgtgtaagacagtgatacgtgctatggaaaaaataaaacagggaaaaggaatcaggactattgggagagtgtaatttaaatattatggtcagggaaggccccacagaaaaggcgacgtgagtaaaaactgaaggagatgagggagggaaccatgtcagtattcagaggaagaacattcggaacagagggagcaaatatgcaaagcacttattcggcacctactgcatgcccacatgacagcaatagcaatatgtggctatttgccaaactgtcttcattcgtgaaacatttaagcttactacagaagataagagtttttttctttcccatgaggttgagaatatatggaggatgggttgcccagaagcagtggcaacatttgcattaaaagaaggcagccttttaacccgaggaggaggctgagaatccaatgacttttctgtcatacgattgaggggacaggagcctagtgataatgggacacggagcttcggctgcagagctctcttttgtccacaatttagggcaactgtcttgcactctgcctccatcctctgggtagactcagtggaggaaacgtttccacaggcaccaggcaaccgggctcctggaagcagcagacccgggagaggagagcaactccccagcttggtgttagatatcatctgagactccttacaccctcgcagcttagaagctcctcagattaccaggcaaggcaaagttgattttgacaatgtctggggaaggaagggctgctcttcctggctggctggcataatcagactctggaggagtcggcctgcctatcaaaggaggtgagagctaagttgttgctgcctttccgcttcaggatgaatggattccaccccattgaactggagtgacctggtgcctggattctttcatctctaaaatgggaaaaataattgttgcacatatatggtgttgaaattatggccctcaattggtgataattatcattacttagtattaataattattatttgtgaaacttctcccagaattgctgcatggattgcaatgtccaaataagcttataatggggcttccagacactagcagtgaggcagtttctgtagaggttgagtggcggctcttcaccgactaactgggtttgcgtcccccgcctttttgttttccttttttaaaatacattttttaaatatcatggagtgtcactatgttgcccaggttagtgtcgaactcctgagctcaagggatcctcccactttggcttcccaaagtgctgggtttgcatcctggatggcctcttaggagctgtgtgcccttgggcaagttgtttaaccttcctgagctcctgtgtccctatctttaaagtgaaaataataatagcacgttttactacttggaaggaggctggaccaggttttctacagccagaccatctacgctttccaaagggcctgggcagcaagtgagtattagtctactaagagtgtaattatgttatattaacagcacctacctccaaaggttgctgcgagcagagagcacctcacagtgctttacagcagtgcccggctataaccatcacagcattattattaatgtgattagcctcattttgcagatgaggaaatataggcccagagaggttaagataccccacgcagggacctgcagctagtcggtggcagggatggcgctggaatccaggggttccctccagaaccccacagcggcccatgctgaaaaccagacaacgcccgcccccgccagaaggcaccctgggaacggaaagctggcagccttccaagtcccaggacgcgctggggcccagcccccgctccgccctcccccatccctggaacaaagtacacttctgccgcaggaacattccagcaaactgaaggcatcgcgggcgcggccgccgcccccgcctccccacagctgcacggagcgtccacggccccaggccgagccccactgtgccccgcttccgaccccgcccgccctgccggctccccgtcgcccgccgcgtgtgcagacgcaatcgcaccggaggaattctctggtctctttgctaacctcgggacccgcagttgcaaaggctgagggacggggtgggcggagcagacgctgaggactgcggtgcccttaggggcacggagtcgcttggcagcaaccgctcctgggcccgctggtccccggtcctgggcagcccccactgccccactttactcctttacaggataaaggcatgctgttgttaataacaagtagaactaggagaaagatctctattaatcccaccaggctgagacaactgctattaattctggttatgtccttcctgactttttgtgtacacaaaaaacacagatgtacattaacacgaaatatcctgcgatgatactgtttgtttctaaattaacgaactttagttgttagagcagttttcagttaacagaaatttgggaagctagtgcagcgttcccatataacctcccaccgctccctcagtttcccctgttattaatatcttgcatttgtcacaattgataaaccagtattgatatattagtattcactacatttcatggcttatattaaggctcactctttgtggcgtgaagttctttgcgttttgacaaatgcataatgtcgcatatccaccattacagtatcatacagaacaattggcccaaaaaatcccctgtgatccccttgttcacctctcaccctctaatcccatgcagtcactgatctttttactgtttctatggtttggccttttccagaatgtcatatagtcggaatcgtatagtctgttgccttttcaggctggcttccttcacaaaacaatatgcctcttaagattccttcatgtctttttgtggcttgatggctcatttcttatttatagctgaataatattccatagtactgacgtaccacaatttgtttatccattcaccttttcaattgcctccagtttttggcaattatgcaaaagatgctataaacatttgtgtgcaggtttattttactgctttctggcttgcttttaaaaattatttcagtccaggtgaggtatggagtaaagaaacaaacaaacaagtcatgaatgtcattcaatataaatgtagatctatatcatcattttaatggctacataagatactatcagagtttatttaaccagccccagttgtacaacatagattgctgtcttctttgattctgacctcataaacctgtaacaacttggtctacacttgatagtatcttgtagttgttaaggcttagttgcttgtgtcctgtgttcaaatcccagccactccacttaattacttggtgtccctggataaagtatttaattccttatgagtcagtttcctctttgtgaagtgggaataataatggcacttattgtgaggattacatgagctgatacatgtaagatgtttagaacagtttagaacctagagcaatacaaactcataataaaatttagctctttttattatttatttatttttttagagacaggatctcactcttttgcccaggctgtagtgcagtggggcaatcatggttccctgcaacctcaacctcaagcaatcgtcctgcctcagcatcctgcatacaggtgcacaccaccacgcctgggggtttcgccgtgttccccaggctggtcttgaactcctgagcttaacaaaatgatccacccacctcagcctcccaaagtgctgggattataggcatgagcccctgtgcccagctaaatttttatttttatttatttatttatttatttgagacggagttttgctcttgtcgcccaagctggagtgcagtggcgcgatcttggctcactgcaacctctgcctcccaggttcaaatgattctcctgcctcagcctcctgagtagctgggactacaggggcgtgccatcacgcctggctaatttttgtatttttcgtagaggtggggtttagccaagatgttagccaagatgttctggatctcctgaccttgtgatccacccgcctcagcctcccaaagtgctaggattgcaggtgtgagtcactgtgctcagcctatttattttattttatttattgtttttggagacagagtttcactctgttgcccaggctatagtgcagtggtgcaatcttggctcactgcaacctccacctcctgggctcaagtggttctcatgcctcagcctcctggagtagctgggattacaggtgtgtgccaccacacccagctaattttttgtatttttagtagagatggggttttgccacgttgcccaagctggtctcgaactgctgagctcaggcaatctgctggcctcggcctcccaaagtgctaggattacaggtgtgagccacaatgcccggcctttttattttttattagagacaagtcctcactatattgcctaggctgatcttgaactcctgggctcaagggatcctcccaccttggcctcccaaagtgctggaattacaggcatgagccactgcacttagcgctcttatttattgtctattgagcatctactttgtgtcctgagctaggcttggggaagttatcaaatactaaatcctatgtatagtttttttaattaaaaaaatattaatttatagagacaaggtctcactatgttgcccagattggtcttgaactcctgagctcaagcaatcctcttgccttggcctcctaaagtgctagggttacaagcgtgagccactgtgcctggtcatatgtgtaatgttaccctcaaaacactttagtttggctcctgctgggggataatgcaaagcacagtagtactaactctttatgttgttttctctgcgccaggcactgttctggaccctgggagtagcagggttggaatttgaacgcaggggtctggttctaaccaccctgcctctctgtacaagtaatcccagtgcaaaagacaaagcaagatgtgttctaataaaggggagatgaagaactatgagaattcagaggacccagtgatggcttccagctgggcataccagggaaggctctttgttaaacttcacttagtgaacacctatggagcttttatagacaatacacatccctaagcactgggggagtaaagaagcacataaaaccaatgggaaacatataatttggtgggagagaaagaaaacagactcaacaagcaaatgtcaaatggcaggttgtgacacaagctacaaaggaaacacaggcttccttgacgataatactcggggtgtggtggggattggcaccttggtcaggacagccttggaggaggcagctctgaaacactgagcactgtgagacgaggagccagccatgggaggaactgtgggggatattctaggtgccagaatgagcaaaagcctggaggcagaagggtgtcttggtattatatgttttaaataccatcggaagctaatatggaagggacacagggagcaaggagcaagtggctaaagatgaagttgcagagtagatacgggccagtttctaagaactttctaacctaaaagaacttcctgaaagtggctgaatagcctggaggtaaggacaagaacatccactccacgtgcagctgtgatggaccaggctctatacatgctcttcacacagtgttgtattcaaacttgcctacgactcacttggcaagatagggagctgaggattgggttttattcccagtgtgtagggaagccactgaagggttttaagcaaggaagtagcatggctggattgatattgtagaaagatcctgtgggctgctgtgggaatggagtgaatgtttgcaagggaggaatggggggaccaattacctgactactgcagtcacctgggcaagagagagaatggagatttggctagaatgatggcagtggacaggaagagagatggatttgaattatatttcagaggtgaggctgagagaagatgttgatggattagattagggtggggtagggagaggaaggaaacggatatatgctcattttaagtgactcaaacaattcagaaaagtataatgaagaaaccatttaaaatcctctaaaatccacttgcccagagagtactattaacttgatggagacaccctgctagacagctttctatccccaaacatagggaataaatgggctccttcagttgaaaaccacagagatccactgaagctgacttatgtaccagatactttgtttcgaggacttaggggtgtctcctggaactgcacaccagtcagcttcatgaagaactggaagcagtgcagaaagccgggaatacaggggcctcttttttctctctggggcttaccatctacttctccctgcctcctctagtcttctcttctttggctgactgaccttggtgtgcacactccatgtggctgccctcccttgctttgtattactccccaactccagcatctaacaagatgtgctgatggccttgagtcacagatcccattttctgggagagaaaatgggatccagcacactgacgatgaagtggtccattctttgtgtattggtctgttttcacattgctataaaaaactatctaaaactaagtaatttataaaggaaagaggtttaattgactcacagttctgcatggcaggggaggcctcaggaaacttacagtcatggtggaaggcaaaagagaagcaaggtatgtcttacatggtggcaggagagagaaaacgagcagggaactgccacacacttttaaaccatcagatccagatctcttgagaactcaatcactatcatgagaacagcatgggggaaaccaccctcatgatgcaatcacctcccaccagcttcctcccctgattacaatttgacatgagatttgggtggggacacagagtcaaaccatatgactttgcaggatggagaaaggtcactggtacagatgcaggtaggctgtttcctttggtggtgggaagatgaggtggctctcctggatgctgcttttatttcaaaggaatgggtgaggttgtcaggtgtgaagctgagagtggattggggatgggatgggatgttttctaaaaaacaagaagatatgaaataatttgtgtttgagagtagagacatgaatgagtgctgatggcccacttgaggtttgtggtcataaatgtaaagagagattagtggacagagttgttttcttccagtcacatctagctgctcaggtgaagggaatttgctctggccatttttcaggacaatataatgaggaagagaggggccaggagtggttattgtgttagaatctaaagggataattaagaaagtgagaagataagtgaagggataggtagtgaaaacattaggaactctggctgggattgaagagttattgagtcaggatactagagtgagagagctggaaatattggaagggttggccaaagagtgaggtggggtgctaaaaatgatgattttaaggtggtgaagcagtcattgctgacagtccagggcctgaccatggcagcaggagactgaggccataatgagtacaagacagctggagaggaagagatcaggagtctgggcagccagcctcctacctggccctagtggttctcatgaggtgtattcactccccttgactagtccctcctgtgctcattggggctggcatgtgtaataataactgtatgtcttctgaggctgtgttctaaaagacattgcagcttctgtctttgttctcttggattgtctcagggaagccagccaccacgccatgaggacactcaagcagccctgtggagagacctacctagttaaccaaccagcacgaatttgtcaggcatgtgagggagccacgttggaagctaatcctccagccccagtcaagccttcggatgattgtggcagccccaggagataggctacagcagcatcggagactctcagccagagtcatctgtctctggctccccaaagcctgcccatagaaactgtatgagatcataagtgcttattgagttgttttgttaatttggtttttgtttgttgttgtcattgttgaaacagagtcttgctgtcatccaggctggagtgcagtggtgcgaccttagcttactgcaacctccacttcctgggttcaagtgattcccctgcctaagcctccctgcttcagctgggattacaggcatgcaccaccacacccagctaattttttttgttttgttttgtttgtttgtttgtttagtacagacagggtttcatcatgttggccaggctggtctcgtactcctaacctcaagtgatcaacctgtcttggcctcccaaagtgctgggattacaggcgtgagccactgttcccagcctattttgttaatttgtgatttgttacacaatagataagtaatacagaacctgaaaatctaggatgttggatgggtttttgataccggagttggttgaaatcacaaaatggtgagtactgctgatggtgagagaggctaagagccagcatctaaaatcttcagggagtaagggagattatccaggaggcttcaatgagaacagtgagtggtatagcctaaggacacgaacttcaagggaacagaattttgtagagaaaaggaaggataattagtctagaaaaggcagtgtacagccaggagggtacctacccctcctccaggtctgtagtatatggggtgtaggagaaaaaccagcccctgctttaaagggccacaaaaaagcaacgtcctcaggcacaaccagattttagtgaaagcaggaaggggaaatgaatgtttggaggagaggttgaggattgaggacattttcctgagggtggaccatgaatttcagggtcacagtggaagaatggaggaagtagggaagggtgggaaactggttagattaagggatgtgataagagtctgggtgatgatggattacctcagagtcttggatatggggcggctattgagataaatagggatgtgaggcatgcgggtgagtctggagggtctcagagaggaaaatgggtaattagtttcttctcagggttcatgctttatgcagtttccaatggtgagacaaaagagagctggtcttcccaggaacactaaagacctcttttcttttgacagggtcttactctgttgcccaggctggagtccagtggcatgatcttggctcactgcagtctcgacctcctgggctcaagcgatcctcccatctcagcctcccaagtaggtgagactccaggcatatgccatcatgccaggagcctttagcaggcatgtcctgctaaaattttggttgtattttgtagagacgtggtcccactatatttcccagtgtgcgtcttgaacttctgagctcaagcaatcctcctgccttggcctcccaaagtaccgaccgggattaaaggtgtgagccaccaagcccagccaaagacctcttataaatgctgttataggtagtgtaggggccatgaaaagagttttgcaaaaagaaaaattgttcatatttgagaagaagttctttgtctttttttttttttttttttttttttttttttttgagacagagtcttgctctgttgcccaggctggagtgcagtggcgtgatctcggctcactgcaacctccatctcccaggttcaagcaattctcatgtctcagcctcctgagtagctgggattacaggctgcaccaccacacccagctaatttttgtatttttagtagagagagggtttcaccatgttggccaggcttgtctccaactcctgacctcaagtaatctgcctgccttggcctcctaaagtgctgagattacaggcctgagccaatgcgcctggcctgttggatccttttatctttttcttattgctttataaatgatttatatattctggctacaagccctttgtcagttctatgtgttgtaaatagcttctcccatttcatgacttgcattttcactatcttaatgctgtcttgaaaaacagaagctccaatttaccaatcttttcctttataattagggcttttgtatatcttgaccaagaaatctttctttactccaaagtctgaaaaacattctggtatattatattctaaaagttttattggtttgcctttcatatttagactgtaatacatctggaatttattattctgtgtagtgtgaaataaaggtaattttcatttttcctatataaatatctagttgacctagtaccatgtactgaaaagactttcctttccctactgcagtacagtgccacctttgtggtatatcatatgacaacaagttcatgtatctgattctgggctttcaatctgttctgtggtctatttgtttgttcttgttccaatactacactgttttaattaccatggcttcatgagtcttgttaattgtttgtaactcctcccattttgttcgtcttctttaataatgtcttgattattttaggctctctgaattttcagatacattttagaatcagtttgaaaatcttggcttggcgtggaggctcatgcctgtaatcccagcacgttgggagggtgaggcgggaagattgcttgaacccaggagattgagaccagcctgggcaacatagtgacaccccatctctacaaaaaatataacaattagccaggtgtggtggcacatgcctgtggtcccagctactcaggaggctgaggtgggaggattacatgagcctgaaggtcgaggttgcaacgagctgtgattgggccactgcactccagcctgggtgacagggcaagaccctgtctcaaaaaagaaaaaagaaaaaaagaaaatctccacaataacagcctattaagattggcactggggttgcattggccctgtaaattgattgggggagaactgacctctttatgttattcagtagccaatccatgaatatccagtccataaacatcctacatctttttgtgtagaaatgtaagtgatgtttgtaaattgattttatacctagcgtccttgctaaattcacttattaattctaataatgacagttttgtttctttctatccaggcctcatatctctcacatatatatatatatatatatatatatatatttttttttttttttgccttattatactagctatgacctctggtacaatgtcttaagtagctttattcatggtcgcaaagggaacactttcaacatttcactggtaagattgatatttggaagccgaggatagcctgtagtctcagctacttgcagccacttgggagggtgagacgggagaattgcttgagcccaggaagcaaaggttgcagtgagccaagattgccctactgtgctccagcctgggggacagagcgagacaaaacaaaaaatttattggctgacatttttcttacttcctgaggtatatgcttaggtaattgattttcagcctttcttgttttgggatatatgtgtttataagtctatacatttctctctaagcacaggaagttctgatatgtcatactttcattatcattcatctcaaaatattttctgatttccaccataacttgttctttaaccatcctggttcaattaagaagcattcttaggccatgcgtagtggctcatgcctataatcccagcactttgggaggccaagaatcacttgaagccaggagtttgagaccaatctggtcaacatggcgaaaccctgtctccaccaaaaatacaaaaattagctggatgtggtggtgcagcctgtaatcctagctactcaggaggctgaggaatgaggactgtttgaacctggaaggcggaggttgcagtgagccgggattgcaccactgcactccagcctgggccacagagcgagactctgtctcaaaaaaaaaaaaaaaaagaagaagaagcattcttagtttccagatacatgagagtattccaatttcctttttgttattagtttctagcttaattgaagtgtagtcaaatttactccttatgatttcaatgttttagaggttgttaagacttattttattgcgtagcatgtagtaaattttaataaatgttctttgtattcaattacatgattccatcttgtttattgggtgcagtgttctacagttgtcaataaggtcaagtttgctaatcatatgcaaattttctatatccttctaacttttgacagcttgttctatcacttaaggagagaagtgttttaaagtaagcctgtgtgaatatgtcttttctcctttttgtttctatttttgctttatgtactttgaggctaaatattgagtataaataaagttagatgtattttatctttctagaatcaaatttttttcattatggaatgttcctctttatttagtaatgcttttttgctttgaagacaattttgtcagttttaactttcaaactttctgtattcttatatcttacagttgtttcttgtaaacatacagtagggctttgttgttttttatatagcctgacaatctttgtcatttaattggagcatttagtccatttacatttaatataatgtaaatggtcattgatttttcatcactttttgttagttattatttttatttaattctaacattaattatttgcttgcaacttgttcctctgttttatgttctttcccccccattccttcttctcttcctttgaaatggcttttaaaactgttaatagaactataatgtatgtacagaaaaaggcctaaatcttaagtgcataccttgatgaacttcatcaagttagcttcataagctgagcagacataaaagaccacataaactgagcacatgtgtataactgaggcaggagaatagggaattaaggtagccaaggattgggtaataagcaaagcagttaggttggagcataagcaaaggagtagcaggtgcagccagttcacagaagcaagaaaacagcaggtgcagccagttctaggcaagattgggcagcatacaggccacctctttactcctgtgataagacagaagtttccacttcggcctctgattgactggtccaagcctccactttagcctctgaatagtcacagggcaatcctttataggttgtaaccaattggaggcctctaaaagcacctaggggtgttgccaaagtcctttggcttcataaaaaccccggggagcattgcggtgaagaagcgcttgagctgcttgtttgagctttctcccgctctgtgagttgtactttcgcttcttcgataaatctgtgcctttattactctgttcttttgttgttttgtttgtgcatttgttgcttcttttgttgctttgtgtgttttgtttactctttgcacaacacaccaagaacctggacaactcacagtcaagaccttctatccagtaacatactttggtgggccagccagaaggtaagcccaaattttgggatttgtttttccttttctttgtcaaagctgtcatttgtgggcatgagttgaacagataaaagccagtagggtgcccgtcgcttgaagtcttctgtgacaggataacttggtcatagaacaggacacttaggtcctgctgagatcaagacaaattcgtgcaacagacaggtttttgtttgtacggcaaaatgtctttgaggaggttagacccctcaggccaggcacggtggttcatgcctataatcccagtactttgataggtcgaggcgggtggatcacttgaggtcaggagttcgagaccagcctagctaacatggtgaaacctcatctctactaaaaattcaaaacttaaccaggtgtggtggcacatgtctgtagtcccagctgcttgggaagctgaggcagaatagcttgaacccgggggcaaaggctgcagtgagctgagatggtgccactgcactccaagctgggcgacagaaagagactctgtctcaaaaaaaaaaaaaaaaaaaaaaggaggttagacccctcattttctgattcctatactggtcttgttgatgatttgtcgggaagtagtagtgcagaattacttttccacttatttatattcctctttaagagtggggaaagagactgctgtttcatgaattctttatatttctcttagagtggggcaaaggattcctgttttatgcagaattctgttttcatgagaacccggaatttttaatggtttgtagggataaatccgagactttattgttaatggttttaaggtacattgcaaggtctcttgtttcatgagggttacaggctgaagaaggatcacatgagtccaggaattcaagaccagactgggcaacatggtgaaaccccatctctattttttttaaaaaaagtaaataatgtaataaaataatcataggccaggtgcgctggctcactcctgtaatcctagcactttgggaggctgaggtgggcagattacttaaggccagaagtttgagaccagcctggctaatgtggtgaaaccccgtctctactaaaaatgcaaaaattaggcaggtgtggtggtgcatgcctctagtcccagctactcaggagactgaggcaggagaattgcttgaacctgggaggcagaggttgcagtgagccgagatcatgccactgcactccattctgggcaacagagcaagactctgtctcaaaaaacaacaaaataaaataattagaaacatgtttgtgtctgtctcattttgctcaaaattatttgtaaaattaatccatgtttgtattagtctgtaaatctgccatagcaaagtattagacttgggtggcttaaacaataaaaattagttgttctgtaggcaagaagtccaaaatcaaggtctatcagggtggtttctggttaggcttctcttcctggcttgcagacagctgccttcttgctgtgtcctcaagtgacctttcctttgtgtgtgtgcagaaagagatttctggtctcctcctcctgtaaggacacccgtcctattggattagggccccatccttatgacttcatttaaacttaattaccttattcagggtcctatccccaaatacagtcacactggaggttaaggcttaaacacatacattttggtggttgggtagtggtgacataattcagtccagtacaatattattgcatgtttgttacttttcatagctgtgtagaaattcttcgtgtgcatatactatactatgtatatgtatacatggtatgcatatactatgtatatgtatgcatggtatgcatatactatgtatatgtatgcatggtatgcatatactatgtatatgtacgcatggtatgcatatactatgttttatttgtgctactatcaatgggtatttgatcggtttccagtttgaggttattatgaatagtcttctgtgaacattatatgtgttttgggtgaatattacagatttctgtttggtatatacctaagaattgctaggttcatggaatattcttgttttcagcattactagacactaacaattttcccataaatcaatttagactcccaccagcagttacgcagagttctttttcctctacatctttgtaaatatttgttattatctgactttatttcttcattttaatcaattctggaggttgtgtggaatatctcatgattttaatttatatttccttcataactaatgaagttaattaccttttctgtgtttattggccatttggatatgatttgttgatttatatttaaatataaattatattttatgagacagggtcttgctgtgttgcccaggctggagtgcagtggtgcaatcacagctcattgcagccttaacctcccaggcacaaacaattttcccacttcagcttcctgagtaactgggactacaggcatgcaccaccatgcctggctgattttttttcttttctgtaaagatggggattcactatattgcccaggctgatcttgaactcctggcctcatgcaatcctcccaccttggcctcccaaagtgctgggattataggcttcagtcaccacgtccggcctatttaataatttatatgattattgtgaagtgcttgttcaaatcttttgtccagtattccattgtttcgtcattctgttattgatttgtgggagttttaaatgtattcttgccacatgaatacagacttgtaactgtaatagatttgttgcctgatgcatacagcaagtcaatatgccaagacactggcttgcagcagagaaagaggtttaatcataaggtcaccaaagggcttggcgcagtggcagcagcctgtaatcccagcactttgcaaggccaaggcaggctgatcacttgaggccaggagtttgataccagcctggtctacatagcgaaaccacctttctactaaaaatacaaaaattaccctggtgccatggtacgtgcctatcatcccagctacttgagaggctgaggcaggagaattgcttgaactcaagaggcagaggtggcactgaaatcacaccactgcgtgcaactccatctcaaaaaaaaaaaaagttaccaaacgagttaactttgggaggaaacctcaaatccatctccctgaaggagtttgggggtaaagtttttaagggttttggagtgggccaaagtgtagagattgttgattggtcaaagaggcagagtgaagacatactgatcccattcctctgtgggagtcttctaactggttgatatcagctgttttactagaacttcaggcaatccttaaacaaaagccttatgattctaatgtcagagatcctgtcataggaacagtggagatgcaaataaattattaaacagttttatgaccctactgtcagaaatcctgtctataggaagaacggggatataaatggtcaggagctagtgctacgtgacttttagcaacaaggaagtgaaccaaaggtcagcctgattaatgcttaattagaactatatttctatccagaacccagcattcaattcttgtcaaccctgtggggcagtttcagcctctgttgttgcaaataccttcttatactcggtggttttgttatcggaaaggggtcctgatccagaccccaagagagggttcttggatcttctccaagaaagaattcaggacgagtccatagagtaaagtgaaagcaagttagagaagtaaggaaacaaaagaatgggtactccatagtcagagcagcagcatgggctgcttgactaagttatacttacggttatttcttgatttatttacttatttattgtttttttttgagacgtagtcttgctcttgtcccccaggttggagtgtgatggcatgatctcggctcactgcaacctccacctcctgggttcaagtgattctcctgcctcggccccccaagtagctgggattacaggtgcctgccaccatgcccggctaatttttgtatatttagtagagatggggtttcaccatgttggccaggctggtctagaactcctaacctcaggtgatccacctgcctcagcctcccaaagtgctgggattacaggcgtgagccaccgcacccggcctatttcttaattcttgtttagacaaggggtggattattcataagttttccagaaaaagggcagggatttcctggaactgagggtttctcctcttttagatcgtatagggtaacttctggacattgccatggcatttataaactgtcatgacgctggtgggagtgtcttttggcatactaatgtattatcgtataatgagcagtgaggacaaccagaggtcacttttgctaccatcttggttttggtgggtttgggctggcttctttaccgcattgtttcatcagcaggttctttatgacttgtatcttgtgataccagtcctgacctcctactcatcctgtgactaagaatgcctaacctaggaatgcagcccaataggcctcatcctcatttttatctaggcactattcaagatggagttgctctggttccagtgcttctaacagtttggcattttactgtctttcaataagcagacattataaatcttaatagagtccaatttattattttcccttacatagttggcccatttttggggtcttgtttaagaaacttttgcatactacaaagttgtgaagatattttcttatgtttccttcaaaaagctctattgttttttcattcatatttagatctactgtctggtggatttatttcttatgtgtggtgggagatagggaccagaattctttttttcatatggacattcatataatccaacaccatatatttgtttttaagaaacccacaaaaccttagacaaatttaatttaacagattttatttatttatttttttgatagagtcttgctctgttgtccaggctgcagtgcagtggtgcagtctcagctcactgcagccttgacctccccagactcaggtgatcctcccacctcagcctccagagtaactggaactgcatgtgctctcctctaccactagctaatttttgtatttttagtagagatggggtttcactatgtcacccaagctgctctcaaactcctgggttcaagcgatccacacacctcagcctcccaaagtgctgagattacaggcgtgagccaccacacctggctaatttaacagactttaattgagcaaagaatgagaacctggcagcctcttaacaagaataactccagaaaggttccagtgcggccttgaggtggaagatttatggacagagaaaggaaagtgacatatagaaaaccgaagtagggtacagaaacagctggattggttacagctcagtaagtttgccttattagagcatggtttgaacagttagccacctttgattggccgaaacttggttattggcactggagtaggttacagtttatttatttatttacacatccagttaggttgcagttcactatgtatggagaaggctttaggcagaacttaaaatatgaaaggaggcagctttaggtgaaacttaattgaacatattaaaagatcttcttttttccacatagtattaaaacatacctatttagtctttgtccctaattcctgatacagagctactaaaacccaaggaatttcctgagtgataggaatatcttgttattcagaacaagccctttctatcacacctaagtttacgctactaaggtgacagggtggagcctatagatagcatcagaatggggctggtcactagaaaacccagtgattagagtgttggaactttcaaccccacccatcaacctccaggaatgaggggaggtggagattaagctatataaaaactttgagcaatgagatttgataagcttccaggttggtgaatgaatccacttgctggagagtggtgcaccccaactctgaaaccaccattgcaaaattataactgagacagcaaaagagatctgacctaaccaactctatcttgcttgtaacctccaagccatccttgtttattcctgggtataggttgaactaactttgggaataacttagtttatagtttaaaacaaagacaataacagccctttcccaaaacaaaccctcttcttgccttggggatagactgcctttgtatgactaacaaattagctaaaagattaaaaattacagtttaggagtcatgcagcaggaggctacaagattctgaccttctcctggggataacatctttattgtaagactaagatcagtgcttgagatattttgcagaccttgcacttgatggatcagctggcaccacccagatcgataaactggctcatccaatgttgtggcggtcacacaggaactgactcagcgaaagcggacagcgtctaatttctataatttcatctctgacctgaccaatcagcactcccgacttactgcccccaccacccgacccaccaaatgaaccttaaaaactctgatcccccagtgctcgaggagaccgatttgagtaataataggatttgagtaacaacagccggctgtgcatgaattactttctctattgcaaatctcctctgtctctgcagcaggcaaggtgagccagctgggtggttacaaatcaagggtaagcgcctgaggtcaggacccttccaggccttgcctgtgtgcttcttcatctgtgataataaaccggcaaacataagtaaagtgtttccctgagttctgtgagaaatactagcaaattatcaaacccaaggagggggctcatggaaacccaaatttatagccagtctgtctgaagcatgggtcacagcctggaatttgttcttggcatctgaattgggggcagtcttgtgggagtgaacctttcacctgtgggatctgacgctatctctaggtagattatgtcagaattgaattgaaatacaggacacgaagatggtgtctgctggaaaattccttggtgtgtgtggggaaaaccctcacacatctggtacgaaagtgttctgtgttgtgagagtacagcaagagaaaaagtgtttttttcaccccaatgtattgcagtgttaattttgttataaattagatgactaaatatgggtctaactttattggtttgtctgttagggttgatatgttttgttattctatttctaccctatgactttttttttttttgagatagtgtcttgctctgtcacccagcctggagtgcagtggtgccattacagttcaccgcagcctcagcctcccacactcaagcaattctcccacctcagcctcctaagtagctgggactacaggcatgcaccaatgcacccagttagtttttttgtttttttttgtagagacatttcaagagccatgtttcccaggctggtcttgaactcctgggctcaagtgatctacctaccttggcctcccaaggtgttgggattgcagatgtgagccacagcatcaggcctgaatctgtgacttattaaagtctaacattatttggtagttttacctccttcctaggtgtaagagaggaaagaaacacaaactgcagctcatcagtaaagacaggtttactttagataaaatatgagaggggcttctagctgatttttttttttttttagtcaggagtgctttctcttacagactaagagtagacattggttttagggtgagggggcttatcacaagcttggaatgtttctatgtgaaggagaagggttttttgttttgttttgtttgagacggagtctagctctgtcactttgggctgcagtgcagtggagtaatcttggctcactgcaacctccacctccaaggcccaagcgactctcctgcctcagcctctcatgtagctgggatcacaggcaccctccaccatgcccagccaatttctgcatttctaccagagatggggtttcaccatgtcagccagggtggtctcaaactcctgacctcgtgatccacccacctaggcctctcaaagtgccaggattacaagcatgtgtcatcgcgcccagtgaaggagaagttttatggcagggttggaatgtctctgggaagaggggagttcatcttggggcagacatctttctggtcagagggggttatctcgaggctggcatcttcctggctggaagggggttatctcagggctagcatgtctctggttggggaggagtttggaacgtttctggttggagatgttatttgtggtttatggtcatgttgaccttagccattaggctgatgccctttggatttaggtggttttttattaaggtgaactttagaatgaggggcttgtccaagatggcaatgctcctgctctgtcaccaggaatgcaaggaacttgcattcaactaacttcatttattagcctcctcaacttagatgcaatttttaaaaatgtattttagttttgtatatactttaaacctcatgagatattgttgtggtggtggttgttttagcagttaagagtcaatttgactatttgattcatccctatatttgcttatattgttgctctttaatctttcctgtatctctgtgctttcatctggtatctttccccatttgcctgaagaatacaaaatttcctttgaatcaaatctgctattaattgattctcttaaatttattcttctctctttctttttctttctttctctctccctctttctctctccccccttctttctccctctttctctctccctcttctctctctccctctttctctctctccctctttctctctctccctctttctctctctccctctttctctctctccctctttctctctctccctctttctctctctccctctttctctctctccctctttctctctctccctctttctctctctccctctttaaatagagacagggatcttactatgttgcccaggatggtcttgaattcctggtcccaagaaatcctcctgcctcagcctcccaaagtgttggggttgcaggtgtgagccatcacagctggccaattctcttaattttcatttgtctttttttttttaagagatggggtctcactatgttgcccagactcaattttgaaaatgtttttattttaaaaaaagctttttatttcatcttccatcttgaagtgtatctctgctgggtgtaggatttcagtgttctaatattgtattttgagctccattgttttgttcagactttacatgtcattctaattattgctcctttgaaggaaatctgctttcctaagatattcattgtgtttgagtttatgatttgtctggaagtggttttcttttctttttttttcattctgttgggcatttgtaagaattattgcatatgtggcttgatgtctttaatcagttttggaaaattctcaggcattatctcttcaaatattgtttctgcaccaattctctctcctctctgtgtgggactccatttacatatatgccaggccttcgcattgtattgcctgccttctatattttacttatttttgactctccatgctttattctgattttttttcagatctgttttttaatgcatttcttctctcctcagctttgtctaatctgctgttaattccacacactgagttcttatttgttggttgtggtgtttttttatatctagaatttccatttggttaatttttatggtttccagttatttgttgaagttctgggggaatacaaatacttgctcagtgtattcatgagcaggtagactcttttgctctgggactggctttggaaccacttaaggagctgccagaacctattgtaacatggacggtgccctatgaatgctctctattgatcaacaaagaacttcttagtttatggatggcagttcgaaagtgaacggacagcattctgctcaaaaggctgccactctgatttaaaaagtaaaaagaaattaactcatcaaactgaattgcatactgtttgccccagtgttttactgactcatgagcagtggtcaatgtcctggccttatggtcaggcagaagagcaatggaaaagtggcctcttaaagagatgcccatatggggcccacctttatggaaaccactagggggaacttgagggatgcattaaagtagaacatgttgatgcccatcttagtgtttgggtcataatttataaaggtgactgagtaacagcacctagaggctagtttcactgaaagaagatttttattcacatttcctgagaggagggtcatgttacaccattctggaccacatagggaagcaccagtattgatcaggaggcagaaaggagtgaggggaaggcatagaccacaggcaatattggggtttccatgagaaaggcaagacagggtaaagtaaacagcttaggattggctagtttgaataattccagtgggttttggggtatttgggattttcctagttgtttggtacctagttcagtgttggtttaggattgggaaatattggcttggggtgtgagcatcagatgaggaggatgatcagcgtatgaattcgtaaacaacttggccattagtttggtcctataattaatgagtgctaaatagacaaatgtgggatctaaaaacactcagtgagatgcgaaatatcaaaagaagtcccttcaggataagaaggtcattggtgtcagtgagtggatatcttgatatgttcacttgaggtgatcacctgggtcatgaaacaagtggacattgtggggtgggggctgtagcaatgcaaagatgggctaaatttaggcatattccttttgcaccctctgaggtgcaaaatgccagtaagtacagttctgtctgccaacaagagagacagactcagatggctatgggacagattccctggggggaaggcccagcacatagctggcaagtgggagtgatgctggtagcactagaggctataaatgggtccttaaagaaatagatgtacacgctggactgggttttgcatacccagtggtagatgcaaatgctcagatactataaaagaactggaacagaagatactacaccaatttgggtggttgagtcacatttattcagaccaagggacacagtttcagcatgtaatgtccaataacggacacagagatgtcctccttagaataatagtttaatagagaattggaatgggcatttaaaacattggttggccaaaatggagggagatataggcatgaagggctgatttacatgccttcatgagtgtatgctcacacctaacatcagagtgccaagccagtgccccactagctagaatcctctgctatttttgtggatctgaagatgagggggtgggagatatgctggtataactatgcagttcttcccacgaaaggaatgtgctggtatgactatacttttttctttcttccctataggatcttaactgctttttttatttttaattttttaaaataaaaatagagacaaggtctcactatgttgcccaggctggtcttgaacttctgagctcaagtgatccgcccacctcagtctcccaaactgttgggattataggcatgagccaccgtgcccagcctcatctcaacttctttttcctacctaatgcagtggtcccaggcacagggctgtaacaagtgctggaagcaaagataattcctaagcaagaaaccataaccatacttttaaacctttatgtcagaattcctaagggcctcagggagcaggttgtatcttgatcccaggtagcaaagctggggttaatagtggatgtagctacgttgcttaatggtagaaatagctgagttctgtaccttttataaccctatcctagatgagatgagatgaatgacagtgaactgaggaaggcacttgctagactagtattgctgcctgcaatctaaaccagcactgtagctaaagctaacctcccttccaaagatggaaaagttagggcataaatagaagtaggaatagtagctgtgagtaaaggaatggataaatgtgttatgcaatgagggaagattcaatatttcattaatactttgaaagaagctccaagtaagagatgacgttgtctcttagctcacttatacaagatgcctgaaagggtgaaatcatatattgctgagaccacccctctttatggaaccatgcaagataaaatagaagcttgcaaacctgagcaaacttaccctgggagacatttggtcatacaatatgatgactggactaatcagtaactgaatgggactctagcaaagttccaaatatcattttttatttttcaggttgcatctaccacagtgtgataatgatataacactggtattgttcacaggattataatactgatgttgatggtcaaatgtataaggaaattgaattaaaagcctcctatccctatcctacactggtgcctccaaatgttaggcatattcatgttggtactgtggctgtgtaagaggcattcaaaccagagtgactccatgttgaatagggactgggtaaaataaggctgagaccgactgggctgcattcccaggaggttaggcattctaagtcacaggataagataggaggttggtacaagggacaggtcacaaagaccttgctgataaaacaggctgtggaaaagaagccggctaaaacccaccacagacaaggtggcaataaaaatgacctctggtcgttgtcactgctcatttatgtgaattataatgcatttgcatgctaaaagacactcccacgagcaccatgacagtttacaaatgccatggtgacgtcaggaacataccttatgtggtttaaaaaggggaggaaccttcagttccggaaattgcccacccctttcccagtaaactcatgaataatccaccccttttttagcatataatcaagaaatcaccataaaaatagccaatcagcagccctcagggctactatgcctatagagtagccattctttattcttctactttaataaacttgctttcaattttctctgtggactggcctgaattgtctcttgcacaagatccaagaaccctctcttggggtctggatcaggacccttttctggtaacagtggtatatgttatattaatgctacaccaaatgtaggtgctcagataggtttgatggttttgctataagatagccataaccaatgaccagagggtagcctgttgtatgataaagaatttgtctttgtcccaggtttctggcttctaaaaccctgggcatttcccaagtgatcagagtgtctttgttattcatggaccccttggagcacacctgagtttatgctaatgaggtgacacgtggtgggcctctagttagcttcaggacagggcctgtcatggtttaagccatgtcatatgagcctgacctcccaacctccaggaatggaatagagcctggagattgaattcgatcatgtggctaatgattcaatcaatcatacctatgtaatgaaaccccaataaaaactctgctcactgagctctgaggaacttcctggtcagtgaacacgttgatgtgccaggaggatgacacactctgactctgtggggagagggcacagaagctctgtttgggaccctcccagacctcactctgtaagtctcttcgtttggctgatcgtgacttgtattctttatcataaaattgcagctatgactatagggctttcctgagttctgagttgttctagtgaattgtccaacatgagggggtcataggaacccccaactttgtagccagttaatcagaagtgcaggtggcccttgaagtgtggctggcatctgaggtaaggaaggtcttgttggggagcaactgtgcctttaacctgtagagtttaaggctaattccatattgttagcatcagcattgtacaggtgcttctcaacttacaatggggttgtgtcccaataaacccattgtaaattgaaaatattataagtcaaaaatgcattttaaaaaattagctgggcatggtggtacatgcctgtagtcccagctacttgggaggctgaggtaggagaattacttgagctcaggagtttaggactgcagtgagccctgatggagccactggactctagcctgggtgacagaatgagaccaccccttaaaaaaaaaaaaaaagagaatacatttgacacacctaacctaccaaacatcatagcttagtctagcctaccttaaacatgcttggagcacttacattagcctacagttgggcaaaatcatccaacacaaagcctattttataatgaggtgttgaatatctcatgatataatttattgaatcctgtactcaaagtgaaaaataaaatggttgtatgtactcaaagtgggatttctactgaatgtgtattatctttgcaccattgtgaagttgaaaaattgttaagttgaaccatagaaggtcagggaccatctgtattttggaacaataactggtgtcagaaaagactccaattatttatccttagccccaaaaggctgtcaaatactctgcttagcttctcagtctttctaatgcctcttctagactcatctgatgcccgctggggaaaggtaacactaaatactgagattcattccctaggttttcttctgaattttggtcctataatttttcattggcttgttagctcttgagtccttcaatcagatgttcttcatattctgcccagattttcaaattgtccttagtagaaagtttggtctgagttatccagtctactattaatagaaacacaaatccctcttctcagtgacttatttttcattgtggttatatatacataaaacataaattttgtcatttaaatcattttaaaggccaacatggtggctcacacctgtaatctcagcactttgggaggcctaggcaggtagaatgtttgagcccagaaattcaaggccagcctaggcaacatgataccctgtatctacaaaaaatataaaaattagccaggtatggaggtgtgcacctgtagtcccagctactcccaactacctgggaggctgaggtgtgctgtagtgagctgtgattacactactgcacttcagcctgggtgacagagtgagcacctgtctcaaaaaaaaaatcattttaaagtatacagttcggtggcatttaatacatcctcagtgctgtgcaacaaccaccactctctatttccagaacattttcatcaccccaaaaggaaactccatactcattaagcagtgacttcccattccctctctcctcagcccctggcaaccactaatctgttttctgtctttatggatttgcctattctgggtattcatataaatggaatcatatagtgtatggccttttgtgtctggcttctttcacttagcatgttttcaaggtcattgattttttttttttttgtatgtgctgttttctttgtctaaatattctacagttactgttttgatttcttctttgactcaaagcatttaggagattgtttttacatgttctatttttattactttcagttttggtgcactgtagtcagaatatgactgcttctgtttcaattttttgtaaattttctttgtggcctgttgtactatcaaattttgaaatatctcatgggaacttgagaataagatatagtttctatattcagaatatagacttaaatactctttacctgtccggcaagctagttaactagctatcatctattatcaatcttattaaaaatatcattcaaaatctcaactatgtttcctctatttgattcgccatcgtctgagaggtgagttaaagcaccttgttgcagttgatttctgtgcttagttgagtattgcatcctgtaaataaacccttataatttttatatttttactttatgtatttcagtgctattaacttattgtaatatatatttgcttgcatgcagcctgtcattgacaaaactcttgcctactttttgtttggatttgcctggaatatgtttactccttcattaatttcaacctttgtgggttctgttgttttaggtatatctctcattgataacatatcaatgcctcccattttacattcaaaagtgagtttatatcagttttattcaagcctataacagacaggtttagtctacttctgtcatatttttgtattctcagctttggcttctatgtgatctgtttttgtttgttgctttcaaatatggaacgtattcaagctgttttttagttctactggtagatatctttgtgattgtaaataatatgtttaggccaggcacagtggcttatgcctataattccagcactttgggagaccaaggcaggtggatcacttgagtccaggagttcaagaccaacctgggcaacctaataagaatccatttctacaaaaatttaaaaattatctggttgtgatggcatgtgcctgtggtgcccagctactcagaaggctaaagtaagagaattgcttgagcctgggaggttgaggctgcagtgagctatgattgcatcactgcactctagcctgtgtgacagagttagaccctgtctccagaaaacaaacaaataaataaaaataatatgttcaatcagtatttctcaatttataatcttcaaaaaagaaacagtaccatttattccctcttaaaaaaaaaaaaaaaaaggaaattggcgatttaaaaaaatcacccttgcagcagccactgtggaaaacggtgtggtgattcttcaagaaattaaacatagaccaggcacaacagtgcacgcccgtagtcctagctactcgggaggctgtggtgagaggatcacttgagctcaggagttcaaggctgcagggaggtgtgatcgtagccagggcattacacctgggtgacagagtgagaccccatctctaaataaataactaaaattttaaacaggaaattaaacatagaattatcatatgattcagcaattctactcaaaagaagtgaaagcagggacttatgtatttgcacacccatgttcatagcagcattatttacaacagtcgaaagatggaagcaacccaagtgcccattaacagatgagtggattaacaaatgctgtgtgtgtgtgtatatatatatatatgaaatgaaatactcagccttaaaagaggaggaaattcccataaatgctagaacatgaatgaaccttgaggacgttatgctaagtgaaataagacacacacacacacacacacatacacacacacacacactgtatgattccccttatttgagatatctagaatagtcaaaaatcatagagacaaaaagtagaatggttgttgccaggggttaaggaaagagaatggggagttagtgtttagtgggtatagagtttcagtttgggaagataaaagttctggagataaatggtggtgatcattgtgcagcagtgtgaatgtacttaacaccacagaactggtcaatttggccaggcatgttggctcacacctgtaaccccagcactttgggaggccatagtaggaggattgcttgaatctaggagtttgagaccagcctgagcaacatagaaagacccaatctctacaaaaaatttaaaaattagctgggcatagtggtgcacatctgtagtcccagctacttgggaggctgaggtgggaggattgctcaagtctgagaggttgaggctgcagtgagccgtgattgcatcactacattccagtctaggtgacagagcaagaccctatctccaaaaaagagtaaatctgatgttatatatattttgctaccataaaaacaaacaagcaaacaccaatctccttttccttccattccttctttaattatagttttaggaatttcccccatatgttctattatcaacaacagcaatgattaacaaagaaacattttgtagagtgtttttttttcccacaataactataacgattatattattttccagtaaatgtgatcattacggttatataggctttcatgttcaaacacatttaatgcttaccaccagcctgtttatacctcagttttctcctatgtcagttctaaatttggattcatcatctgtctctaacatgtcctcaagtagagtgatatatttcctggtgaaataatgatgagaagctatgtcttatgtaatgtctttagaggaagaccttcaggtctcagtggtaacagctcctcccctgtggctgcaggctatgggattgtagcaccatcctcttggtttcccttaactcttgcctatacctcgtcaataatccctttactaaactctcttccattaccaagcttgtgagtggcttgtttccagctgggactatgactgatacagcctctgccgcctctgctctccaagcaccccttccttcctatctcctctccctctctttcttttcctttttccatcttccactcttatccctccttattcttttcctcctcctcccttttggagtgaggtgacatgtgggctatgtaggttagcatatcacgctccgcatctggcccctggctgcccttgtccctgggtggtcaagaacagagtattccttctttctgagctgctcagtgttctggctgcttttcagaatgtgcagcccatcccccagcctctcagaagccccaccccagccagcagcctgacagagctcacaattctgttttaagcttactcccttacaactagttttatttcctagtctgacatcttgggaggatgggtgagaccaaatctgttacatcagtgtctagatggagcattcgctagttcaggccaagacattatgagtttcatttttatggctctcccaatccttgtgtgtgcagattttattgtgttaggagttaaaaatgtaataagcaaggagaaaaaaaaaattaagtcacttcagctaaagactacagcctaacaaaatccttaacagacgcttgttagtcctgttgctgggaagtatttgtccagcagacctggaacagtttaaaaaaggagtgggggtttggttaacattaaagaaacacaaagatttttcatctggctctgggggagaccagagccacagagggaacaagaaaagaaagaggggattgaacatttttgcaaacaaatgataaaactgccttttaaagaaggaggggggatcccttgtccaaacaagacttctgccagggtaggaaatcatttctgcaattgtttacaatgctcaggcagccggtcctaagtcaacatggcctgggagcgttgccctggagcctcctgcctttgccagccgcctgccatctcgagctcagctatttctgggacttagctccctcccttgaaaaacaaaccgtggccctcactgtcatccccaataaaccccccagtttgtgcagccttaatcatgttttccagaagagttctccaactgacggcctggatgcaatgtgttgggctcaggagagccagtatgtgtgggggaagggaagctctcatttgtggatgccaagatggaaatttccattgcagtacaagatggcttcacctgtggccaaggaaacctacttcatctcaaagaggagaacttggctaatgaacagcctgaaatttatgtcctttcttagtttgttccataaacccagagcaaagtttgcttttactaaaaagcaccgtaattactagtcataacccttcacatctggttgtcacttagtgtagaagtcttttcacttctgttatctcatttgttctcccccatgagaaaggcattattagtcccatttatttaccttttttgaaaaaaaaaaaaaaaaaaaaaaagatgagatctcactatgtttctcaggctggtcttgagctcctaagctcaagtgatcctcctgtcttggcctctcaaaatgctaggattacaggtgtggaccactgtacccagtcaatcccatttatttaattaatccatctatttgtctccttatttggtgttaataatacagtcatgtggcttgaaaattttaaattccagtgaaaagatgtcttctcttctactcttccacaattcttctggtctctatctgcccacaggtaaccactactgttcatttttctgtgtatctctccagagatgctttatgtatatctaagcaacttggggtggtacaaggagaaagagtattgcagagagacagaaaagtcccaggcactaggcctagctctgtctccagttggctgtttgacattgtgcatgctactttccctctctgaacctcacttacctcacttacgtcatctgtgaaaatgagaataaaagctaacattcattaggcttatatgtgcctgccactgtgataagtgtttttatatgtgttagttgaattaagctcactacagtcctataaggaggcactgtaagtcccatttatccatgacaaactgaggcacagagaaattaaatatcttgcccaggtcctagttaattagagggagagcctgggttttatgaagctaggtagtctaacagtagagctcattcaccacttaaacccctgcgctatatacggccactcatttatgatactggcactaccaaatgatggcttgaaacaggaggctgccccagagtggttcctcccaatttaggtatctaaaatcctatgtccagttcccataaaaccctggccaggcagctctgagtcactcagccccattcagatgggatggtgacagctggcaaagagcagcagacagcagggcaaggctcaggcatgaaccctgatgtcagaccagtgcttccccctgtgtccctccaggggaatcaggacaactccttaataagaatttcttattttttatcaaaggtagtaacgcacgtaatttaaaaagccaactcatattcagagacaaaagacagcagcccagaacaaacacttttaactcctttggttagttctgtatatatttatctcccttattcttgtcaaccttaaataatattcagaaagtatgattaaatatagagttcatttgagcccaaagcttgaggatggccacccaggaacatggattcaagttgccctgaatatacattctaattagcagcacctacaaatgggtttttaaagggaaaaaaagaagaggcagttcctaagttgtttaacaagaatttacattaaagtaacataagctattaattggttatacattgttctttgtatcacaaattctaggaacatgaagataatgggtgaggccagctagtcaggaacaaaatgcctttaaacaattgcccccagggcatgggcgggatgcggaggtgggggtgagggatgagagtaggggcctgactgaagtcccaggtctctctgagccaagtaaattttgcatacctctcatagcttacagcagtctgagctatttttcttttttcattctaaacctagatagtaaatattttcagctttgtgagccatacaatctttgttgcaatttctcaactgccttatatctagaaagcagtcaggcaatatatacataaatggacatggccatcttccaatacaaccttatttacaaaaacagatttttaaagcaaaaacagatttgacctgttgatgcgggatttttctcggtcactttgccagccagagacctccagccagcaatacccctggcccaggccttgctcgggcctgggttcaccacaggagaggccccatctaccgctgggctatgcccggcttgcactccagtgtgggtgctgtgtctgctgtgactgtgctggcaggaggggatgtgtgagccagtgacagcagggtccagccagctgttctaagagccggcagaggagtgggatccatgcagggcttgtggctgaaccaggtgtgtcacaagcgactcctgtggtagactctggtgtccagacgaggggaatgtggtggcacccaagcagcggtgccctggaccctgaagcccagagggtgtgttacagtgtgctaattagctcttttagtcccattttccgtggcccaatggatggcagtgtgttaacagctctgtcagccccgttgacccgctccagcccgtggctcggccttgctgcttcttcctattgtttagggcagctgccttctgctggcagagggcagaaggccacagtgttacagccttctttgtacctgcattcagtgggtcctgagttcttgtttcacatccaagaataatgaggttatgctgacaaagggtgaggagggcagagaagaattttattgagcaatgaaaacagctctcagcagagcagggacacaaggttggtcccccacttgaaatcaggtggtctttcaatcaatgtggctgggtctgaggcttttatgggcccagaatgggagagcgcatgctgattggtttgtgagtacgcaagaaagcctaaaacgaaggtaccactcaaaggtgggcatgacggtgtaaaatcccaattgaggaagggtagatacatgtaaaataggtgaagggtagggatcaatcaggggaaggcacaccaaatgggaagagaggttctcaatctggtccaaggatttacccaggacttgtagctagggttcaaacagtctttggcttgaaggtcaggtttcactggggacctacctctgtctgactaggatttgtctgcttcctgttgctaatcactgtgggatgtagtttactgatatctgttgtaaattcttaaatttctgtttcttaatttataaattttaattaattttctattgtggtcaataaaaatttctttttcttcatttctatttttattttttgagacagggtctcactctgtcacccagctgggtgacaatcattactgactgcctggagtgcagtggcacaataatggctcactgtggcttcaacatcctgggctcaggtgatcctcctacctcagcctcccgagtagctgggactacaggtgtgcaccaccacgcctggctaattttttgtatttgtttttgtagagatagggtttcaccatatttcccaggctgatctcaaactcttgggctcaagcaattctcctgcctctatctcctgaagtgctagaattataggcatgagccattgtgcctgcccccaagaatttgcctttcttaaacagctctcctctctgcagttgtttaccctcccaactcatcctaatagagttatattgtaattatcagttacattaatattcaatgtttatattatgactaggtaaatactgttctctgttgagccaaacaatataccatctcctttctcatacggcctttgtttttacctggagttaactatttcattcttttttttttttttcatttgcatggtgtatttgactttcaacagcctctctcagaattttctacatggtttaacacctcttttttccagtgctactgttttgctggaggaggccctcctacagccttccagactgccactccagtgtagactgggattccctgggcctgggcttatctcttatcctaaaactttctttctccactatcctggaaatctactggatctcttctctatattggatctctttttcctagatcccatgtcctcctctgatttacttcctcattttccttaatccactatcatttttttttttttttatggagtcacactctgtcacccaggctggagtgcaatggcacgatctctgctcattgcaacctctgcctcctgggttcaagtgattctcctgcctcagcctcccaagtagctgggattacaggcatctgccaccacgcccggctaacttcttgtatttttagtagagatggggcttcaccatgttggccaggctggtcttaaactcctgacctcaggtgatccacttgccttgacctcccaaagtgctgggattaaaggtgtgaaccaccgcacccagcccactatcactcttgaatgatagttttggaagggctagtattctagacaggaaataattttttccccaatattttgaagcatataagttgttagaagtctgatatgttttaaattcttaatcctttatatgcaatctgtttttcttctctagaagtttttataatcttctctttattcctaatgttctgaaatttcagcatgatgttgtcagaggcatttgaaccagagcaactccatcttgaatagggcttgggtaaaagaagtctgagacatattgggctgcattcccaggaggttaggcattctaagtcacaggatgagataggagttcggcacaagatacaggtcataaagatcttgctgataaaacaggttgtgtaaagaagtcggccaaaacccactgataccaagatggcaataaaaatgacctctttttttttaagcctcatattcattttctgcattaccttgtgcctctagttactgagcctttttgagtttctgcagggtaagttgacttgcttcacatggtatcacccatgcacagtctattaagagtcagccgcttctagtctgataagacaccctcgatgtctatcgacttttcatcctcctagcgcatgttgacgactctttcccccattgtttccattcttgtcctctttgtccttgtgaacttagtttgttcctattgcagtgcccccaattggtctttgtttctatccttgttcaatctttgtccttttacagtgtattttccacagagaagcaaaggggtctttaaaaatgtaagtcacaaattcagaacatttgtggacattccataggacaactgcactaacctctttaatagtcaacagcatgaaaacacaaggcaaagggataggtagggactctcctactacattaaaaaatatttaggaggcaggccaggtgtggtggcttacacctgcaatcccagcactttagggggccaaggtgggtggatcacaaggtcaggagattgagaccatcctgtctaacactgtgaaaccctgtctctactaaaaatacaaaaattagctcagcctggtggcatgcgcccgtagtcctgaacccaagaggcggaggttgcagtgagccgagatcatgccactgcactccagcctgggcaacagagtgagactgtcaaaaaaaaaaaaaaaaaaaaaactaggaggcatatcaaaagttgtaatgtgtggtcacgatataagcaaaccaattgtaaaaagacatttgtggactattggggaaatctgagtaaagaaatttaaaaattattaattttgttaggtgcaataatagcattacggttatgtaggaaatgtattttctagagattcatattgaattataaaatatgatgtctgaaaatttgctttcaaaagctcagcaaaaagatgaagcaaacataacaaaatatttatttatttatttattttattttatttttttgagacagagtcttgctctgtcacccaggctggagtgcagtggcgtggtctcggcttactgcaagctccacctgccaggttcatgcaattctcctgcctcagcctcctgtgtagctgggacctacaggtgcctgccaccgtgcccagctaattttttttgtatttttagtggagacggggttttaccacgttagtcaggatggtctcaatctcctgacatggggatccgcccacctcggcctcccaaagtgctgggattacaggcgtaagccactgcacccggcctttttttttgttttttaaagacaggacctcattgtcttgcccaggttggaatgcagtggtgaggtcatagctcactgcagccttaacctcccaggcttaggagatcctcccacctcagcctcccaagtacctgggattataggcatacaccaccatggctggctaattcttaaatttttttgtagatatgaggtctccttatgttgcccgggctggtctttgtagatatgaggtctccttatgttgcccaggctggtctttgtagatatgaggtctccttatgttgcccaggctggtcccctgggtttcagtgatctgcccatgtcagtctcccaaagtgcctgggttacaggcatgagccaccacacctggcctctttatggcacttattatcactggcttttacatttttgtggttaaatatatttatctttttaaccttttttttttttttcctgagatggagtctcgctctgtcgcccaggctggagtgcagtggtgcaatcttggctcactgtaacctctgcctcccaggttccagcaattctcctgcctcagcctcctgagtagctaggatcacaggtgtgtaccaccaggcccggctaatttttgtattttttatagagacagggtttcaccatgttggtcaggctggtctcaaactcctgaccttgtgatctgcccacctcggcctccaaaagtgctgtttaaccatttttaactacacatttaattggcactacgtgcatttacattgttgtgcaaccaccactattatctatttccagaacttttttgatcatcccctactgaaactctgtactcaataaacaataacaatatgttcctctccccagcccctggcaactatcattccactttttgcttccatgtatttgactactctcagtacctcatataagtagaatcatgtaatagttgtccctttgtctctggtttatttcacttagcataatgaatgtcttcaagcttcatccatgttgtagctgcatatcacctgccattttatacatttgtttggtcattcgctttttatcgtctgctctcccgactacccaaaaggtaaggtcgttgggggcaagagctttgtctgttttgcttgttcatctagaacagtgcctgggcacagaataagtactcaaatatttgttgagtaatttgcctcctgttgggacaatctcctttttttgcatagagttggccttcttttctgaacacgatgtgtccatttagaaagtaatttttagctcccgctgtgcaaaacactttgggggacaggaagataaggcagcgaagcgagttagagtggtgcagctgacggggttagagtggtggagtagacatctgttttcattgttttgttttgttttccctgcccaacatttactccccttcttctgatattagcagtgggattttcctttgggatatctcccttccccattctcagtctgtgtggttataaaggatccatctcatcctctggcttcaaggcaagataagtaacccaggcctgccaataagacccaggcatgagacttctgttgcaatcattacactgagcctacaaaactgggagaatgtgagcctggagttctgatgcctcactacgttgaaatcttatatttgagaatgaagacaacacagaagaaaatagagttcagagatggacaaaagggaataaagccctgatcacattatttgagctcctgaaaccagccatgcccgaagtcagagatccatttcctggacttttcagctttgtgagccaataacttctcaacgtcttcccatttatttgtttatttcatcttattttgatttgaattggacttctgtcgcctgctgccaaaatattcctaatataagggagacagacaaaaaggaaagaaggtagagagactcaacttgtggggtttggaggctcagctgttatctaggaaaagcataaaggatttaagatgtttacctcaaagaagagaagcctctggaagacagggctacatctttagatatgtaaagagctgtcatatgggagaagaattaaatttgctctagataatgcagcaggaaataccaggaccagcagctaaatatttttaggaaaaaaagttaattcaggaggaaggaaaatgtagaggccccagaagcagcctagaggtactgtagtgaagtggaagtgaatgagcccaaggtggggagacacaaatggtatacactggtgagaaaaagggtagccctgcatggggcctcattgtagataacccttaaggtccctgtcttgggaactccccacttgtgctgactgatgtaagcagagattgagtttgtcacctgaaggcattagacacatggcccctcctcctcaaccctgggcctcctactcatgccagaagctaactacaaggttgctcaaaaacacagttgataggggctgaccattatgttaacccatggagtataagatatgttagtctgttcttgtgctgctataaaggaatacctgaggctcggtaaattataaagaaaagaggtttattttggctcatgtttctgcaggctgtacaggaagtgtggtgccagcatctgcttctggtgagagtttcaggaggcttacaatcatggtggaaggtgaagggagagcaggcttgtcacagggtgagagagagagaaggaggtgccaggttccttttaaactatcagagatcaaggtaacagagtgagaactcactcattaccatggggagggcaccaagacattcctgaggggtccacccccatgaccaaagcagctcccactaggcccccctccaacattggggattacatttcaacttgagttttggaggggacagatatccaaactatatcatgggagaagtgggctttctcaaggaatttgaaaaaaatttttcttgtcagcctcttctgtaaaagaatatccagcaccaaagcatgtgctgtggttttgttaaaaattgttctgtaatttgaagagtctgggtcacagccccagagagcttctggatggcaactgcatcacagtcctgaaataaaagatgctgtcaatatgctgccatccagtgcccacgccaccctttcccgtggcaatgtaggaagtctacaaagacttcctcgcctgcctcccgttccgggccttccctcttcacccaccggatatcttttcctttcttgccttttcctgtccccagatcttgctcttggaccagcgcctaattttcagaaggtatttccagataagaaaagctacagtgacaaagaaaacgcatcagtctaggatcactgtggtggcacagggagagtttgggctttgggatcagaaatgagtttttttactttttaaaaattatttattttttaaaagcttttttttggtttgtttttaaatgagatgtagatatgccttagaagtcaaccaagtttaagttctgactctaccttacatggaaaactcaattttcctgggtttcaatcccctcatgtataaaggaaggataatgatactttattttggggagtctcgctctgtcacccaggctggattgcagtggcgcaatcttggctcactgcaacccctgccttccaggttcaagcgattctggtgtctcagcctcctgagtagctaggattacagacgcgcatcaccatgtctggctaaattttttttttttgtatttttagtagagatggggtttcaccatgttggccaagctggtctcgaactcctgacctcaagtgatctgcctgcctcagcctcccaaagtgctggtattacaggtgtgagccaccacgcctggtccaatactttcttaatagggtattttgagaattaaagatgtttctgttaggtgcttagtacagagaatggatagtaattgaaaaatgacaaatatttaaataatgattgctaaaagaccaaaggaccttcaaaacaaccaaagaatttaaatggttggtttaagtggttggacccttaaatggtttttaagtacaaggagagattagtgagagaggtgtgtttttttgttgttgtttgttttttgagatggagtctcgctctgttgcccaggctggagtacagtggcgtgatctcagctcactgcaacctccgcctcccgggttcaagcaattctcctgcctcagcctcccgagtagctgggactagaggtgtgtgccaccatggccggctaatttttgtatgtttagtagaggtggggtttcaccatgttggtcaggctggtctcaaactcctgacctcgtgatccgcctgcctcggcctcccaaagtgctgggattataggcatgagccaccgtgcccggcgagaggtgttttcttaagaggaggtcaaggagagtatgaggaatgcttggagattgtcaaggctttgtgccggaggttccgctactacctacaacagtccatctcccttctttcctgggcttatagccaagattatattttccagctcccctttcagttaagggtggccatatgaccacattctctccagtgaagtgtaagtgatgtaatgacatgtggcatttaaggggctagggcttaacattctcctcctctttttccttcccattagcagcaacccagatatggctgctaacccggcgtcaaccatgcagatgagaactgggctcttggaatggcagaacaataacttggaaagagcctgggtcttgagggactatgggctgcagagctgccagccttcaaggactatactgtgtaggaaaaataaattcctttgctccctaagccatggtttagttggatctctttgttatagcagatgagccttatcctaaatgatatgtcagatatggaccatcttggtatagggcatccatttctcaaacttgggttccttttaataaacaataggcagttgaggtagactaggaaaagccctggactcaaagtgaagaaatttggctgctcagtgaaaataattaacattttgtgctttgcatcatagttgaccaagatttcctctgagagacctagcttctttttttttttttttttttttgagatagagtctgtcacccaggctggaatgcagtggtgtgatcttggcccactgcaacctccactttccgggctcaagccattctcctgcctcagcctcctgagaagctgggactacatgtgtatgccaccatgcctggctaatttttgtatttttagtagagacagggttttgccgtgttgaccgggctggtctcaaactcctaacctcaagtaaaccacctacctcagcctcccaaaatgctgggattacagttgtaatttctttataaaatagcaaccacagaggtatgaggagtgtaagtgaaacttttaagttgtcaagtgttatgcaaacatgagggcctctcagcatctggggcattggagggcactagacgtgttctgtctcagctgagaggcaaggtggggtcctctgaaggaggggccagagagcaaaagtgggcacagtctgctgcctcgtctcctggacagattgacatgcaagaggcccacggtggaatatactcctagccaactaattgtaaaaatatgcagaattatagatacagagagagcctatataataccccacatgactaagagcaatctctgcagaggagcactgcattaaaataacagccgcggcaggcatgaggccgccttcagagataagtgctggagtttggctctaaatgccaacatccttagctaatctaagtaatgcatgagcaggaagaattccgtggctgggagcccaagtggagttgtttaaagaactcttaagaacagctagtaacctccaagcagtaggcccaagtgcatgatggggaatttaacatttaatagaatctgaggggtgaggggctgccgagagggctgggggtggggacttggatctcaatgagaggcacgctgttaaggggcttctggcagcgcctccaccatgccatagttggtttctgtctctggttcatttgttttgtgcaagatcaactcgaatcaggaatcccaggttagaaagtccaccatcctctcattaaagaggccaggaagggcttgaccagaaagttaggggaaaagatgtcactcctgttgagaagggaggcagcctcctacctctgacattatggctctatgatttttggaactggaatattcacctagagattgtctcatatattctccacctccccacccccatcgccaactctcatgttatagttggggaaactgaggcccagcacaggggagcaaagctcccaaaaacacgcagtgagtcgggggctgtggagatcacctcctccaatcagaaccactgcctacttcccacccaccccattatttcacaaatgcagataaggaggtgcagagggagaaagtgacaatgtcaaggtttcattcatttcagggcagaagggtgagtggcagctaggctacctggttcaaaaccataagattttgaccaccacgtttcagcatcttatcagctgagagtgatgactagcaaaggcctctctcctggtctggctcaccaggactttctgcagctgttgcactgggatgggcttccaagctcacccccgaggttgctggcagaattcaggtcctggggagctgttggactgagcaggctcctctcaggtccttgcctcatgggcgtctcctacacgctgatggggaaacagagcatgcaagccaagttggatgtccctggcttttataatctcttctcagaagagacagcctatcacttttttattcttttttgaggcgaggtctcactctgtcactcaggttggagtgcagaggtgctatcacagctcactgcaaactccacctcttgggttcaagtgatcctcctgcctcagaccccaagtagctgggtaggtgagaccacaggtacataccactacacctggctaattgttgtattttttgtagagatggtgtttctccatgttgcccaggctggtcttgaactcctgggatcaagcgatctgccctcctcagcctcccaaagtgctgtgattacaggcatgagccattgctccccacccacttttgttgtattctagttctcaaaagtcattaggtccaggtcccctaccccatacacctaaccatcacacagatgtgcacgcacacatacacacacacatggagaggtctacacagggcatgaatactaggaggtggaggtcaccaggtgcttttcagaagctgttgaccgtaattctctagcagtacataaaaagcatcctggtcttggccgggtgtggtggcacagcctgtaatcccagcactttgggaggccgaggcgggtggatcacgcggtcaggagatcaagaccatcctggctaacacggtgaaaccccgtctctactaaaaatacaaaaattagccaggcctggtggcgggtgcctgtagtcccagctacttgggaggctgaggcaggagaatggtgtgaacccgggaggcggagtttgcagtgagccgagattgcgccactgcactccagcctgggcgacagagcgacacaccacctcaaaaaaaaaaaagcatcctggtcttgtagcaaactcccatcatatggaggacccttgtcccttcaaccagggctctcctggtaggttcatgacttcatgtctttgacctccactggctgggaggctcatgggggcaggggagtcattgcctatggtgcatgcagtagatgctctgctaatactgtactctttagggtaagtggagggtagagaaaggtttctcagttctgccttaattcaagagtgccccaggcaataaactgttgcttgttcttatagaatggcagttgctttggacaaatgttttggaagatttttggaactccagagtactgcagagagtactttcagacaaggttgtcgattggaaaagaaactgaaaagggcctggaccaggctgggctggacacataatatatccacaatatcctggactgaacttgagccattgtgtatttatgtaattgtcctgctgttggcaaagggcaagtccaagcctgaggagtggggtagattccactgaagaaatgttcccatgccagtcatcttgggaggaagtttgtcctggggtagaaattgagaactcaagatgtggacctttggggtgagaaagaagtgtgttctctctctctctctctctctctctctctctctctctctcaacaaagttgggtctgccctacaagggaagacatgttccaggcaacctgagagaaggagctgggctggaccctgctgatggggaacaagctggggctgaacagctaggtggtcctatgagattatctgggtaccaacctgggctctgataaaatccacattggtcactgtgttgagtatgtatttctttgtattttattcttcttccatggtgcccagatttaatcagctcctgctagacactgcatctggtttctgttgagtatgatgcactgaggggaaggctctggccatgcttggggctgagtggccaccatacctggcctgaacattttaatagaacttttcactttacaaaacaatatcccactcagaatgctgggctcggtgcagggacagacaagctcagcagtgtgggaaatcgcagcaggtgtgcagactaaggaagctggagggggagaacataagggcaagttctggggcagtggtaacttagcacctggggcctctccaaaatagctagggatggtcctgcagggactgagttcctatgtgggccagtagggttcaaaggaaattgtagcttgagcattaaatggagataaggcagtttattttcattggctggggaggcctgaacatagttgttctattagatgttgtggtagtaaaaatagataacagcaataatctagtatgtcaacatgtgaggtttttttgtttttttgagacaggatcttgctctgttgcccaggcttgagtgcagtggtgcattacagctcacataatgcttgaactccaaggctaaaagcaatcctctcacctcagcctcctgagtagctgggactacaagtgtgccccatcatgcccggctaatttttgtgttttttgtacagatgggatctcataatgttgcctaaactggtcttgaactcctgggctcaagtgatcctcctacctctgcctcccaaagtgctgtgattacaagtgtgagccaccatgtctggcctcaacattttaatagaacgtttcacttttacaaaacagtttcctatatatccatttctagttgatcctcaaaataatcttatatgtagaacaggcattagattgctaattgttcttattagttacaaggttaaactatatgaaattgccatattaataagtcaaacactgttaaatgtaagcaactttgtatggtttatcctcattacataaatcataactattataaataacaataatagtgtcttagtccattttgtgttgctgtaacagaataccatagactgggtaatttattttaaaaagagatttatttcttacagttctagaggctgggaagtctaagatcaagggacttgcatctggcaagggccttcatgctgtgtcatcctgtggcagaagatggaagggcaagagagcctgagagagcaagaggggacgaaggccaaactcattccttttatcaaaaaacaaactcctgagatcatgaacccactccttcaatagtggcattaatccattcatgagggcagagcccacatgacatatcacctctttttctttttttcctggagacatgactcactgtgttgcccagactgaagtgcggcggtgcaatcatagctcactgcaggcttgacctcccaggctcaagtgatcctcccacctccttagtagctgggacttcaggcatgcaccagcacacccagctgtttttttttaaattattttttgtagatacagggtctccatatgttgcctaggctggtcttgaactcccaggctctcaagcagtcctcccaccttggcctcccaaagtgctggaattacaggcatgagctatcatgcctggccactaatcacctcttaaaggtctaacctctcaaaactgctgcattggggattgagttttcaacacatgaactttgagggacacattcaagccatatcatgtaggaacttaaaaaatatgtacctggcatattgctaagctctcttcacacattttatctcattcagagatgcatattctagtggatatagcaatgttcctttcagattcctcttcagagcccacacactcattcccagctgctgggaatattggctacttccctcactgggaattgcccttggccacaagtcactgcttccaccaaggtgatgcccagaccccaagggtagtcattaggctgtgactggctgacgtgaggatataaagcctgggccccttgcctcaatttgggaccctctgaagggccatgtggctcagagctccctgtaggattggctcttcctggttgcaaccacattgggggtcatcttctccctcttctcagtcctgccctctcacttacgtacaggtgtatctcccaaaattactgcctaagaaaccttctgcagacagaaaccacctccatctcagagtctgcttccagggaacccaaacttaggacagttggtgtcagaggggttcaaggtggcagactctaaagtgggagtttggagagggatcacttgctagtcagctctccatgaactggtataggagtggtaaggatagtccctgccatgctgtaactgcatgatggctaaaacttgcatttctggtgaactggggcgtgatgggatgcagaaaatgctgcttcaaataataacaccttggaaattgagaaaatagtagaaacaggaaggctactctcaccttcccctctaccttcttccctgaagcaaggccataaaacttaggaaggtgacaatctgaccttctcccacccttctctcctgaaaaccctcaggtgacaggtgtcctgccctataccttgagggaatgtcacacaagaacggacaagagtctaaacaaagaggccttgtgaagatccccctctgcagtttatcactattagatcatctcccctttgtcccattagacttctgcaggactgttcattcttcatcaaagccaagcataaggatacacaggtttccctctttctttgagtcttcatttctgaaggctcctgtgtcatgtaaaactaatattaaatacatatgtatgcttttctcttgttaacctgtcttttgctacagagtctcagccaagaacctagcaatgagtaggaagataaatcttttctcccctacatatggtatatgggtggaaggggtcacactcattggtgtagtatctctggcaactgggggccgtagtgactataaggactatggaaatgaatgaccattgctgagtccatttacttgctaaagagacttaatgatagcctcagagtgaataatcaccaaggtaaaatgttaaagccagatggcctcctgggcaactgttaaggaaatccctcctgcaaagggaggatcaggcataggatttaatgttaaaaatagcagagctttggagaaggtttgatttttcagccctgacaggcctccaatgccagggtcagagccataataggtgaggactgggaacctgagacttgggttggggatatatgagtagatgcagtcaagcaccttgaattctcaggtccttctgaacccactgggtttgcagaagtgacacacttcttgttggcaaacagtggtgccccttatttgaagattgcactagtctgttctcacattgctataaagaactacccaagactgggtaatttacgaagaaaagaggtttaattggctcacagttccacaggctgtacaggtctgggaggcctcaggaaacttacaatcatggcagaaggtgaaggggaagctggcatgtcctacatgactggagcaggaagaagaaaaagacgggggaggtgctacacactgtcaaccagaactcgtgagaactcactcactatcatgagaacagtaaggggaaatctgcccccatgatcaaatcacctcccattaggctccttccctaacactggggattacaattcaacatgagatttgggtggggatgcagagccaaactatatcaaagatcatacaaggtttccagtgaggcaggtgccctacatgagaatgcttgtcctcctcagaacccaactttacttccttcctggcgatctaataaaagttaaatcccagctgtgctgagcatgctaagggaggagaggcactatatgctgcaggagccacaggatctagctaatacatttaagcaagcactgtgcacagaacagggtcctgagtaggctggatcaagaggggaggaaggtaaaggtggataagagcaggtgttaatatgggagtactctccatgatacagaacttaacactctggcaaggaacccagggtaagggggtgaacacacttcagagatggattttagaagcttaggaaaagcaatggttcacactaagtaaagtagaaatattagaactgctgtggcagataggagttcaagtcttggagaagtagtccaggtatggtggctcatgtctgtaatctcagcactttgggaggctgaggtgggcggatcacttgaggacaggagttggagaccagcctggacaacatggcaaaacccgtctctactaaaaaatacaaaaaaaaattagccaggtggggtggcctgtacctgtaaccccaactactcaggagtttgaggcaagagaatcacttgaacctgggccagattgtgccactgcactccagtctgggcaacagagtgagactctatctcaaaaaaaaaaaaaaaaaaagaaaaagtaaaagtctcagacaagtgggcctgctagagtgtttgcagcacataaagccagaaaacccatcagccaactctgttctgtgggaggccctggagaacactctatttactgaagcaataaggaatgagtctgtgggagctagaggtggcaccagcttcactgacagtaggaggtgctattacagaactgggctccctgatgcccataggtatgatagaatcccaaaataacagagttcaggtggtggtgcttgacctttaaaccaaggtgactgcaattgcaatgaacagcaaaattggatcctgacccacagagcactatggagatggctaatagaacacagtgttcctagaagcaagatagatgggtggccaacagtgcattgcttaatttagacagtcaaaagaaatcaaggatggatgatcagggggttgaaagcagccacccccagtaatacatcatgatttcttatcctgtttctgacctgagccgttgactaaaggagaggttaggtctctgtgaggaaggatctgtaacatcatggcaaatgtgttcagtagtaatgccccagtcctttcctaaaacaatctatggccatttactgtgtatcaccatgagaaagggggaattctgagggctttgaaggactattagccatggggtctaactcaacactgatatctggtgacccaaagtgcttttatatccctccctcccatcagaatgagggagtatgggttccaggtgacaacgaagccctgatcctgctctaattcacagtgagtccagttgggtgcgtccaccaacccactgtggtcctatccctgattcctgaacgcttcggaatggacatacatggtagttggtagaaccctagcattgattccttgagtctctaaaagtgccgactctcctttgccatgatagtaaatcaaatacaagattgttttttattccaggaggaatggcaggaattagttccaccttcaaagattaaggaaatacagggatggtggtttttgttgtatccccatttaattcaccaatctggtccctacaaaaattgcataatcatggcgactgagagtacactcccacaaacttaaccaagtagtatccctacttgtggttgttgtgctacacacggcatcttcctggagcggatgaatacaccctccagatgcggtacatgaccaatcatctccttattgccttcttttctatccctatcagaaaggaggatcagaagtagctcacattcacacggagcagacaattagatatatttacatgttgcctcagggccatgttaattttgctgcctttatcataatgtccaaaaggacctggcccatctggattttccatggaatatctaattagtgcagcatatcaataacatcatgttaatgagaccaaatgagcaagaaatgacaagtatattaaagactgtggcatgacacattcactccagaaggtgggaaataactcctacccagatttagggcccagacacatcactgaaatgcataaaggtctagtggtctgggcataaaggtaaaggagtgctggagctctgaggtaaagaatgtaaagaacagggcaaccccctcgggtccccttccacgctgtggaagctttgttctttcactctccacaataaatcttgctgttgcaaaacaaacaaacaaacaaaatgtaaagaacaaatggtgagccatcacatttgtacatcagtacaaggatggcatgaaattttcctccacagctgcagctgataccacagggaggctgaggggatgtgatacagggcacttgaagtgtctactctaccccattttacagatgagaaactaagtctctgagaggttaaattgctcaaaaacacagtgctggcaagtggtcgatctaaggttaaaatccggatctgtctgacttgaaagcccatgttctttaatacctatattgtacagataaggaggctgggaacagagagattaagtggcctcttgttgcatcttggacttcctgggaggtagattctgagacagattgtcatgcaggaagtgtattgggaagtgttcccaggatcaacaccctgagggggagtggagaaggcaggactgggcagagggagaggctgggctgtgatgctatcactatacctctggagtgctctgcagaggtgtcccctgttggcagcagggggcggagccttgatattcctgcacagaggcagtccttgggctgccccaggaagaggacatcaccttgagagagaagctcctcttcagccaagggcagttcccctgggagactctgcctaccactgtcagcctttgatacttccggctgctggggggaatgactgcttcaggcctggtagaggggatctggggtgatgtaccccagcatccactatccctctttagggtccttcagctagtgggcaacacaaaagtaggtcctctgactctaaaactaacatagtcctgcttttccagctccataataggtccactatctccgagtgaacaaccaagactatgggatcattgattggaaaagaactgtaatccactcaaacttgatcaaattagaaggagagagtgttggtaataggaatcttagctgaggagagggaaaagatttcattcattcaaaaatatgtattgagtgattaccatacaccaagctccattctcagtgttggggagacaacaagaataatcaaagctcctgctcatgcagaaccctttctaatggagaaggtgtcggggaaggcccagtcctcctggagaccaggaacaacctgcctccttaagagatggaggagccaaatctgtgtctcatcttttcgtaaatgtctgtaggagaataatactgagttaatttctcatctgtttatctgccatatacaagtaaatgcatagggaaaggttggtaacagttgttacctctggggtgggagtaaaatggatggaacacgggagtaaaggagagcttgacttttctctctctctttgctgcccctcctttcttttcgctagttcctcattttgctagtgtacccaggttctaactactgcgtataaaggcagtgtcagagacggcccctgctttcttcccagctctagtttcaggcctgaaacggcagctggaatttccctgccctgtctcctcttttcttcctctctagagactcctcttgctgtcagctgagaagggggaagcagtcacctggagattctgtaaaataggccacacatttgggagatttgggaaaatagaagagagtcattttgcaggctttagtcctttatatatttctgcattacttgaatgtttcatagcaagtgtgatttgtgcattatacatttagctgttgctgttgtggaggtttttagttttttggggtttttttttttttttgagacagagtctcactctgtcacccaggctggagtgtagtggcatgatctcggctcactgcaaccgctgccccctgggttcaagcgatttgcctgcctcagcctcctgagtagtgggagggattacagtgtgcaccaccacggctgggtaacttttgtatttttagtagaggggtttcaccatgttggccaggctggtctcaaactcctgacctcaggtgatccacgcgcctcagcctcccaaagtgctgggattacaggcatgagccaccatgcccagccagttgtagaggttttgtctgtttgcttctgcgttttgacgttgcagatggaagactctggctgacaaaccaggcctggctcgagactttctttttttttatttatgtattttttaattatactttaagttctagggtacatgtgcacaacgtgcaggtttgttacatatgtatacatgtgccatgttggtgtgctgcacccattaactcgtcatttacattaggtatatctccttacgctatccctcccctttccccccaccccacgacaggccccggggtgtgatgttccctaccccgtatccaagtgttctcattgttcaattcccacctatgagtgagaacatggagtgtttggttttctgtccttgtgatagtttgctgagaatgatggtttccagcttcatccatgtccctacaaaggacatgaactcatcctttttttatggctgtatagtattccatggtgtatatgtgttactttttcttaatccagtctatcattgctggacatttgggttggttccaagtctttgctattgtgaatagtgccgcaataaacatacgtgtacatgtgtctttataacagcatgatttataatcctttgggtatgtacccagtaatgggatggctgggtcaaatggtatttctagttctagatccttgaggaatcgccacactgtcttccacaatggttgaactagtttacagtcccaccaacagtgtaaaagtgttcctatttctccacatcctctccagcacctgttgtttcctgactttaatgatcaccattctaactggtatgagacagtatctcattgtggttttgatttgcatttctctgatggccaatgatgatgaacattttttcatgtgtctgttggctgtataaatgtcttcttttgagaagtgtctgttcatatccttcgcccactttttgatggggttgtttgattttttttcttgtaaatttgttgaagttctttgtagattctggatattagccctttgtcagatgggtagattgtaaaaatcttctcccattctgtaggttgcctgttcactgtgatggtagtttcttttgctgtacagaagccctttagtttaattagatcccatttgtcagttttggctttcgggactttctatggtaaagacctctaggcctagcacctgcttgtggcgaaattgtgaaagtggtcaggctacctctgggaaccttttgtggccataccccatcctgttctcctgaatggttctaattctgattgtgggttatcccacagaggtgaggactaagctctgattttttgatcttgcccaaattcttatctaaggggtctggggaatcatgccctacaaaccatacattcttatcagatgagttttatttaaccctgtatatcatgactgactttccaatctgactctcatataacaagaaagaaaatcaaaatatttaaccctaaatatgtttcctagccatttcttgaaattgccctgcaaagtctcttgtgggaaaaatccacattctataaagaatctcttttcccctttgttttccttccttcctttccagatccaggagataatcagctagaaccagacacccttttaggtctgataagaaacattttacaacttgctctctctgaagtctgctatctgagagcttcctctatacaataaaacttggtttccgcaatcctttattttaacctgaacatttcctttctattgatcccagatcttcagataaactcaaccaattgtcaaccagaaaatgtttacatttacctatagcctggaagcccccaccttgacttgtccctcctttctgaaccaaaccaatgtatttcttaaatgtatttgattgatgtttcatatctccctaaaatatataaaaccaagctctaccctgaccaccttgggcacatgttctcaggacctcttgagggttgtgtgacgggccatggtcacacatatttggctcagaataaatctctaaaaatgctttacagagtttgactctttttgtcaacagaggacaagtgtgtctccaggtaggctttcttcccttgggcttttgaacttcacagtggaccttcttgcttggggtgagaggcctgtgtcctgaggaaggaacatgcagcagcagctggtgacgctggtgatttggtgatggcacattctccctagagatgacccgtgagtcccctggggagagcgaggctggctttggagaaaagtcatgggatccatagtggataggcatgaactgctcttgctcagcactcaatggccacttttctggtgacagcactacaattttgctttagtgattgacctgtcttgcatttaatacagccttggtaagattgccattcaagggaccccactaccctgggccaggaaatgggccatgtgacctaaattaggtcaatcagatgctgtcttctaggaacttgaattttgagggactgatacaaaaacagaaaatgtttggggccaattcatcctaattctggcagtccaaggcaacagaccactggttgctgctttccagattcctcaaactgccctcctgcctgtccttctggagcatggggcttcagcttttccttcatctttctgttgcctcactcttccaataaagaactttcaaagtaagttacccagaatcgatttctgttgcttactacctaagacccctgactaatacagcatccataccatctaggcctttgaagacctatcacctccccaaaaagctcaggcttttcaggtgtgctgtgtatgtttcatggtgttttatgtatgctgtggatatggagtggtcaggggatgagcagggcaggttgggtgttagggactaagagagatgtcagtgtcagccaggttcatatcccacattcctgagccatgctgtcagactgggaggtgcaacacccacgggaggggtccagggctgagtataggcagagcatgaaaccacaggctgaacacactacgttttctggaggtgccaatttgaagattttatggcaggtggggagacacaggttttttttttttaatttaaaattgaatatgtatatattttggcatagaatacaagaatctgtgggaatttttatgagaacacaagcatgcactaagaaatttccatctggcagaaagtcaattccatatacgtatctagacctcttggcagtacacatttgctctgcaactataaagggttctttggtggaaatttagagaaacacagacctatggtattgagagcttcaactaaaccacagactgttctaatgtaggtgcctcctctgtctgccctcagattccttttagggttggactagaagtggggcctctcagtcctgttagctttgatatcttttcacagaccctagttactgctactctcatgtacaaccttgttaaaaatcattcaccaaggaaagacatcccctatctctgtgggtaaatgcaagaaacttaaaatcagggaagtggttctcatgatggaggagaaggaagtcagtaaagaaaacttgatctcgccaggcgcggtggctcacgcctgtaatcccagcactttgggaggccgaggcaggtggatcacgaggtcaggagatcgagaccatcctggctaacacggtgaagccctgtctctactaaaaatacaaaaaatgagatggatgtattggcgggcgccttgtagtcccagctactcgggaggctgaggcaggagaatggcgtgaacctgggaggcagagcttgcagtgagctgagattgtgccactgcactccagcctgggcgacagagcgagactccatctcaaaaaaaaaaaaaaaaaagaaaagaaaagataaaagaaaacctgatctctcttttggcatgtgtgagattccaaatatatggatttctattatgtgctaggtatttgtaatgtttcatcattataaccccaagccaaagatggtattataatatcatggtatggatgatgattgttatgagctgaacacttttcatctccccaaattttatgtgtagaaatcttaacccccaatgtgatgatattaggaagtggggactttgggagatgattaggtcatgagggtaaagccctcatgaatgggattagttcccttataaaagggatccccaaagagctctctggatctctttctgccacgtatggatataagaggttggcagtctgcaaccctgaagagagccctcaccagaacccaacaatgctggtaccctgatttcagacttctgttctccagaactgtgagaaataaatctctgttgttgataagccacgcagcttattgtgctttgtgatagcagcctgaattgactaacacaacgatcccagggcccagtgaggttgaataactcacccaaagtcacacaggtatttaggccacttattgtagacatcattcttgttccaggtccccttttgagattgctctcctgacctgaatacagaataaatcagatccacaagactctagtccgaataggtttattgtctgtgtcccttgtcctaatggggaggcctctgctcaccaagagtgtcctgaccacctggggctaggggtgctggagaggagcacagagaggaggaagggcctgaagatgatttccccaacaactctgtactgtgggggttaagagtgtgggctctgagggtaaacagagctggatttgaagcccactctcctcctactcatggtatagataagagggaaggagggggtagagtgggagggaaaccaccaaccccagcaagccacagactccaggaggccaccattgggtcccgaaccatgctcctattgtctttacaaaggggaatggcagctgctccacctcccacaacatccaatcaggcatcctgcagacggtggcaaatcacagagaagcaatggcaaaggggctgtggatgggcctgactgtctggacatggccaaatctgctgcccagccacttgctcttgtgacttcatcctgacctgaagtgtctgcctacaggtgctcctgcctctcccctggcccagcaaggaccgcaggatgcccttccttaactcctgggtaggagcccacagtggtgactgatccacgtgaggtcccttaggtggtaaaagcgtctccacccccagccttcccgggacgtcctgtgcagcaggagttgataacgctgtgtacaggctgatgggggtagacacgctcttgttgccaggccctggacgctctgaaccccagcctgggctcctggccttaatggggcagggaggggaccatcggggcacagagccagggatcctgttactctctacatagaggtgccaagtaggctacttattcaagttttcttttttaaaaaaactttctttccattctatgactctttaagggaagaaattccattgtgcactgtaacactgaggacttttacaccagagagtctcacggggaatattcaggccttggagaaaccactagagtttctgttgctggaggacaggggccctgtcttagattctcttgctcaggcctggaaagatacttagggatggtctagttcagtctgagtcagtgtgagcctggcctcatcccagacagacaaccatctccctacaaacagcaccatgatgccttgttgagttcatggtcccgcctgctccaaggcactgctggatgatcaaaataaaggtccttcctcttacgtgctgtgagtctttaagggggtgaagaagtcaagcactgagtgggaagtacacctagaggcgcagtgtccactgggctgcatgtcaaagtctgtcatgtgtctcctgggtgacgcttaacaaattgcttagcctctctgggcctctgatggctcatctagtgttaataagaaaataagccaggcgtggtggctcacacctgtaatcccagcaatttgggaggctgaggcagaatgattgcttaaagccagcagttcaagaccagcctgggcaacatagggagaccccatttcttttttttttttttttgggagaccccatttctacaaaacttttttaaaaaaattagccagatgtgggggtgcatgcctgtagtcctaggtactcaggaggctgaggtgggaggatggattgagcccaggagatcgaggctgcagtgagttgtgattgtaccactactacactctggcctgggtgacagagtgagaccctgtctctaaaataataacaataatgttataatactactaataatacagtagtgttaggtccttgtggctgcaatacactttgtagtttacaaatcatgtttgcatacctggagtcttagagcttccctacagactactcaaagcagatatttttagccctatttttgagttgaaactgagctctagagaggactagtgactttgtcaagatcacaagtgaccttgtgctgttgctgtttcgagagagtgtgtaatcctgttgctgtttagagagagtgtgttttagatttatgtgacctagaagcaccagcacgggatctttatcctgatgttcttgagccaccaccagctctcctccaggcccaggcttttgtgaattacagtgaagaaaatgcagaccaggcgacttgctgagtgacatggtcacgtatggtggggaatcatccaatacctttaaaatatttttttgaaccttggtggaaaagtgtgtttcttcattcattcatttcttcattcatctgttcatcaaagttttgcgaggctctaaatgtgtgctaggcatgatgcaaggagtggggacaaaatggaaccagccatgactactgcccttgaggaagtcacagtaggtaggaagatggacatcgagacataagtacagcagaaagtcatttatttattcctgtcatttgtgaatcctcttccatcttccagtagtccttacggaaaaagcaaatacccataaaaagatctcttaaggcgactgggggcacacacggggtgggggtgggagtttggggacaaacttcagcacctcacagtcttgtggtggggcctgcatgcatatgtgggtggggcatgaggaggagcacgtgttcttagagctcagtgtccctcccaccacattcccctgtgcgttgccccaggcacaggaactttgtaatcacatccagcctgggactataaccaaacacagcattccaccaccctctgcaacctctttgtttgatcttccccctggagacacaggtcaagaggaagagaaggggaaggggggcaaactgcagggagagtgtgtggggagcttcctttgaattgtcttttaattcagaaacagaaaacaaagatgccatttcccaaggcctgagataccgccgctctgcattaaaggggttcagtctcagaatcctggagcagggtccacctgggaggtcactagtctgacccacctggtttacagagcccaggaagggaccataacttctttgatgtcacacggcagagaggggcagcattgcagtgtgatgtcacagcaaagaggggtagctactcatggagaatgactcaagaagcctgggggaaagccttccccaccagttgctcagtaacacctaaactgccttgcctgtgggacccagccttgtactgcatcatcagagattagcctgacaagcaaatgcaccagggaggaagcctggtaatgggggctcatttatgctagggcgtggatgactgatatcagggtctttcacaccaagaggcttagccggaggcagaggagaggagatcagaagggcactggagactgcaagggcaagaggtgactggggctaagcctagagggaagagggcatggagctgagagcttcaggcacaaaagagaaacttaatacctgctttgtaggccccaggtcctgtgcctgattttctctttcctctgagaaagaagctgtgaggtttctgaagtgtcaagtcactcttcatgtctaatcctgttgctgtttagagagagtgtgtttcagatttatgtctgaactgcatctaaaggtatcagcaaagtcgttaatttcagccacctgaatctggtggctgcctctgcttacgcacagcaacacttccttcctccagtcctgtgggaaataaggtatttcttcgggtgaggtttttgttttgtcttgttttttaataatttaagcttcctgttttatgtatctaatctcttcatattttcagtatgagggtactactaaggggcattttacattctcgaagtatgctgtaattgttgtttataatttaaatttaatctttttctttagtgtttttaattacttaagaaatacatactcattgtaaaggattcaaaagatagaaaagtacatgaaataaaaagcatcactttatcgctttctactgctaaaggtagacacttaacattttggttttctttctttctttctttacttttttctttttttttcagcaaaaaaggtattatatgccacgtcagcaggtctgtgaattcatgaagatccctgagaccatttcaggggtccacaaggccaaagctatttttataataacactaagacaaaatttgctttttttcccacagtgttgacatttgtactgatgttgcaaaaagtaaaagtgggtaaaaactgctagtgtcttagatcaaggaggtggctccttgaactgtcctggtgggtattctgtccttcactactacactctcagaggagccgaaatgccagtttcttaaagaatgtccttaatgaagtagtaaagatgataaattgtattaaatttcaaccctggcgtacctgcctttttaagattctgcatgaagagatgagaagtatgcttaagccctgctgcattccaaagtccactgaccatccgaggagacactcgtgcagctgtttgtgttgcaagctgaattcactgtcccccagtcgccctgtcccccaccagggaacatcatttttactcgaaataatgactgacaaactatggttgttcagatttgggaattttcagacattttctcaaaaaatgaatgaaatgaacctgtcatttcaaggaaactgacagtatttgttactaatgatgaagtttcagctttcttttattttctttttaacttttaagttaaggggtacctgtgtaggtttgttacataggtaaacttgtatcataggggtttgttgtacagattattttgtcacccagatattaagcaaaggacctactaggtatttttcctgatcctctccctcctgccaccctccatcctcctacaggccccagtgtgtggtattcccctctatgtgtccatgtgttcccatcatttagctcccacttatgagtgagaacacgtagtatttggttttctgttcctgtgttagttttctaaagataatgacctccagctccatccatgtccctgcaaagacataatcccgtgcttttttatggctgcatagtactccatggtgtatatgtaacatgttttctttatccagactatcgctgatgggaaagtttaagctttcaagcaaacattagaatttccaaagacttatattttccactgtgagttggacagcttcccaacacttaaagactttagtgatgaaaggggtggtgataataaatgtgatttttgatgctgttaataaaatgtgttaatattagagctacataacttagtgaaccaatatttttcaaagactcatgcataatgttataaaatcatttgtggaagataaaccaatggattttaatgtaacggtatagattgttcattgatatgatttattttttatttttattttatttatttatttatttttgagatggaatctcactctgctgcccaggctggggtacactggtgtgatcttggcccgctgcaacccctgcctcctgggttcgggcaattctcctgcctcagcctcctgagtagctgggattacaggcacctgccaccacacctggctaatttttgtatttttagtggagacggggttttaccatgttggctgggctggtcacgaactcccgacctcaagtgatctccccacgttggcttcccaaagtgctgagattacaggcttgagccaccgcacccggcctcattgatatgatttagaatccacgttgccactaacctttcagaaactaccacttgtcaaattttggtaaacaatcaaagaacaatagccataataatctggaaagactattaaaataatcctcctttttcaactacgtgtgtttgtgagaccagattttcttcatgtacttcaaccaaaacaacatatcacaacagatttaatgccaaagcagatatgagaatacaactgtcttatattaagccagatattaaaacacatttgaaaaaatgtgagacaatgccagtcttctcactaaatgttttgatatagttaactttcataaaaaggatatgatttatagtaacatgcaatgagtttattaccattatttaaaattaagaaactcattttttgaaattatcttaatgtttaatacaataactattgatagacatagcctacataagaaaatctccagccaggcgtggtggctcacacctgtaatcccagcactttgggaggccgagacaggcagatcacgaggtcaagagatcaagaccatcctggccaacatggtgaaaccccatctctactaaaaatacaaaaattagctgggtgtggtggtgcgtgcctgtaatcccaactactcaggaggctgaggcaggggaatcacttgaatctgggaggcagaggttgcagtgagctgagattgtgccactgcactccaccctggtgacagagtgagactccgtctcaaaaaaaaaaaaaaaagtcccttgggatcctcaatagtttataagagcattaagagggtactgagaccaaaaagcttgagaacagcagctctacacattattccatacttaatcattattacagcgctacagattattctatacttgatcactcaagtatgtaggccccagctcctctgcatgcttttttgaaaacttaacctttcccctattgatggatatttagattagttataatttttcattattgtttataatgcacaacaaatatcttttgtacttcttacacaattttgcaagtctttatgtcagacaaatgactagaagaactattgaatcaaagactattcatatttaaaaacttaatactttcaaattacatcctaaaaaggtgatatcattttaaacttctgccaaaaatgtgtaagaggttgggcatggcggcttgtgcccataatcccaacgctttgggaagtcaaggcgggaggatcccttgaggccaggaggagtttgagaccagcctgggcaacagagcaagaccctgtctctacaaaaaaatttttaaaaaattagctgggcatgatggtgcatgcctgcagtcctagctactcaagaggctgaggagggaggatctcctcagcccaggaggttgagcctgcagtgatccatgatttcaccacctcactcaagcctgggcaacagagtaagaccctgtctcttaaaaaagaaaaaaagtgtaagtgtctattttctcatcatctttttttcctgtcttcttaaattaagtattttatgactattttttctcttcttttttttgactcttttgcctcaaaaagcattagagtgagcttaaaatgaaattcgggaacatagacaaattaacaaaagcaggtaaggagggttatactaaaaatctagatgaatggaagacatgtagctaagcactacgtttaactctgtgctttcaggcaactgaggtgaaaaagaaaaacagtgatttacatatctatgactatctactagcaggaagtcaatgagtacccaaaaagagagcaaaatctatgatctatcccttttcttttttttaagagatgggctctcaccatcttgcccaggctggtgtcaaactcctggattcaagcaatcctctcatcttggcctcccgaagtacagcgattacaggtgtgcaccaccacttccagctaatttttaaaatttttgtagagatggaatcttgctaggttgctcaggcttgtctcaaagtcctggcctcaagtgattcctcccaccttggcctcccaaagtgctgggattacaggcatgagccaccatgcctggcctatatgagatacttagtcaaatttatagaaataacaagtagaatggtggttaccaaggacttaggggagggggaaaaggggaggggttgtttaatggtgatatggtttggctgtgtccctacccaaatctcatcttggattgtagctcccacaattcccacgtctcatgggagggaccctgtgggaggtaattgaatcatgaggagtgtgggtctttcccgtgctattcctgtgatagtgaataagtctcaggagatctgatggttttataaaggggagtttccctgcacaaattctctcttgtctgcagtcatgtaagacatgcctttcactttctgccatgattgagaggcttccccagccacgtggatctgtgagtccattaaacctctttttctttataaattacccagtctcaggtatgtctttatctgcagtgtgaaaatggactaatagaaatgggtatagaatttcagatttgcaagatgaaaaagttcagaagatctgtttcacaataatgtgactatacttaacattactgaactagacacctaaaaatggctaattttttcaaaaaatggtactggaacaactggacatccacatgcagaaaatgaatctagaaacagactttacactcttccccaaaattaattcaaaatagatcatagactgaaatgtaaaatgtaaaatgtaaaactacactactcctagaagataacataggagaaaacctaggtggcctgggctatggtcatgactttttagatacaacaccaaaggcacaatccatgaaataaataattgatttgctggatttcattaaagtttagaactgctcagcaaaagacaatgtcaaaagaatgagaatacaaccatagactgggagaaaatatatgcaaaagatataactgataaaggactgttacccaaaatatacaaagaactcttagaactcaacaaggaaacaaacaacttgattaaaaaatagacaaagacctgaaagatatctcaccaaagaagatctacagatggcaagtaaaagcacatgaaaatatattaagcatcatacatcattaggaaattacaaattaaaataacaatgagataccattacatacctattagaatgtccaaaatccaaaatactgacaacaccaaaagctgatgagggtctggaacagcaggaactctcattcattgctggtgggaatacaaaatggtacagccactttggaagactttttgacagtttctcacaaaactatatatactcttaccgtataatcaatcaattacacttcttgttatttacccaaatgatttgaaaacttacatccacacaaaaacctgcaacagatgtttatagtagtcggcagctttattaataattgctaaaacttggaagcaatcaatatgtcctttcataggcaaatggataaataaactttggtatatgcagacaatgtcaagtgattcaacactaaaaagaaatgagctatcatgccatgaaaagacatagaggaaatttaaatgcatattactaatgcattttccaatgtgaaaatgttgcagactgtataataccagctatagagcattctggaaaagccaaaactatggagacagtaaaaagattagtggctgccaggggttagaagggagagaggtatgaataggcagagcatgaaggatttttaggtcagtgaaactattctgtgtgatgcatgtcattatacatacgtcattatacatgtatacaatggtagatacatgtcattatatgtatgtcaaaatccatagaatgtataccaccaagagtgaatcctaatgtaaactatgaactttgggtaataatgctgtacccatgaaggttcactgcttgtaacaaaggtaccattgtggtatgggatgttgatagtggaaggctgtgcgtacgtggggacaggagtggggatgggaactctctgtactttctactcagtttttttgtgaacccaaaactgtcctaaaaagtaaagtttattaattttataaaatggttaagatggtaaattttatgttatttttatttatttatttatttatttatttatttatttatttatttatttttagcacaatttaaagaatctagaactgggcatggtggctcacacctgtaattgcagcattttgggaggccaaggcgggagaatcacttgagcccaggagttcaagaccaccctgggcaacatggtgaaaactccatctctacaaaaaaaaatacaaaaattagccaggcatggtggtgcatatgtcaccagctactcaggagctgaggccagaggagcctgggaggttgaggctgcagtgagctgtgactgcaccactgcactccagcctgagtgactaagcaagaccctgtctcaaaaagaaaaaaaaaaaatgaaaagggaaattaaaataaaaaaaaaaaaccacacacactgcaaagtctcactttcattccatcctgttcttgtcgaagaggcaaccatttaaatttatcctttcagtgtttttatgcaacttccacaaatataagtaatgcatatgtttttctcttcctttcattcacagaaagtaacatcctatatacactggtctacacttcctgtatattgtgttttcacttaacaatctatcctggagatctgtattaagcagtgctgtccaataaaatagtcactacccatatatggctattaagcaaaaattaaatacaattaaaatttagctgggtgcagtggctcacgcctgtaatcccagcactgtgggaggctgaggcaggtggatcacttgaggccaggagttggagaccagcctggccaacatggcaaaaccccgtctctactaaaaatacaaaaattagccaagtgtggtggcacgaacctataatcccagcgactggggaggctgaggcacaagaatggcttgaacccaggaggcagcagttgccgtgagccaagatagcaccactgcactccagcctgggtgacagagtgagactctgtcttaaaaaaaaacaagattagttccttagctgaactattcacatttcaagcagtcaataaccacatgcggctgatggctaccatttgtccaagaatagaatatgtccattatcacagaaatttctttcagaaagcactggttataaacatcttcctcctccttttttacagccatataatactccactgtgtaacagtttattctaccaatcccttcctggagacatttgagttgtttgcactattttgctgtcataaacagtgccctatcatcacatgagtttttgtggaataggttctgcactaacaaaaggcatggtaagataaggctgtgacctgaggcagtgattgctctgcaggcaggccataccagggtgggatttctacttccgtggatctactcagtccttagctatgcaaatctggaaatgttcaggctgatgtcacattagccacactcataagacactattgggcatcaaaaatgagcaattacttgatattaaatggaggtagttctttagatttagtgaaatcctcgtgtctgctgcctaagacattgccttcccagaaggtaagccttgcccaggggaaatggataattctgacacatatttcatccagacatgacaggttcctgttcctaaaccaagtatgcctctccttttatcggaaagcttgtgttcactaggatcaccatttcctgtgcagcattttcccctgggccatctttgcacagatgcctgggaaactattcctcttctgccagctctttcttcaggcagtacaccgtgtgctcgggaggtttcaccttgtttggtgatggtcatgtttcagtgcagtttcaagtcctccccaaattcttcagttatataaccacaatgtcttcaatattgctattgtgacatatggtggttttaaaatacgcctaaaaattctttactactctgctcttcaagtgatgaaattagctgagcatggtggcatgcacctgtagtcctagctactcaggagactgaggcaggaggatcacttgagtccaggagttcaagtctgcagtaagctatgatcatgccactgcactccagcctgggccacagagcgagaccttgtctcttaaaaagaaaaaaagatggaacttaattcccttcctgttgagggtggaccggactttgtgacgtacttgtaatgaatagcatgtggcagaagtaacagtgcgtgcagcttctgtgattaggtcttaaaagggaatgtggcttcctccctgtctggctttcttgaattattcattcagggtaggccaactgccatttcatgaagacactcaactagtcctgtggagaggtccacgtggtgggaactgaggtttcctgctaaaacccagcactaacttgcagggtgagtgtcttcatgcattttgtgctgctctaacagaatacctgagaccgggtaatttataaagagcagtaatttatttcttcacagttctacacactaggaagtccaagattaagacagcggcatctggcaagggccttcttgctgtgtcatcacatggcagcaaggcaaagagagagaaaaagaggggatgaactcatccttttgtaacagtatcaatcccacctctgagggcagagccattacgacctaataacctcttaatgttccacctcttaatactatgacaatgtcagttaaatttaaagacagatattcaaatcatggtgccaggtgcaagagccacctaggaagtggattctccaggcctcatccagcattcggacgattgcagacctggtcaacttcttgaaaatctcatgggagaccgagttagaaccgcccagccaagctgttcctgacccacagagactgtgtgaaatactaagtgtttattgttttatgctactaaatttggggaaaattcattagcagcaacagatagctaacatatctagatggctgagatcatccgtttttgttttgatccttattaatttccctcttgcagggttatcttgacttctaatctacagggacactcgagaacactaacctgtgaaccatcattttcttatctgtaaaatgcaagattggtatgaagggcacaaagcagggacttaaatggaaatgattaatattgttgtcgatgctcattaataatggaagccttgggtatcttccatttgcccctccatatccatgtccatttccaatcttttctcaccctactctgtgccccaggaggggctgacttccatggactatgtcagtggcctctctggttctcagccttccggtagagtttggcaaatgagaaatactggcaggagataggaggagggccagaggaaagggatgtatttccttggtttcttcctttccaagtcaccatgctttatcttcattcctctacctcaggccaccctgtcttggtactggtaactactgtctcctctctcccctccaggcctctgaatgataactgctcccctcttttgctagccccagggtgtgtcagtgtcctttggtgggctccctaagctctgtctgcacaactttgtaaatagtccctgtattaaactcacctcaaattgtatagatcccctgcagggatcctgaatgagaatggctagttttagttgcttttaataatgatcctggattttttaaaagaaacaaacattctataaccagaaagatttctgagaatccaaatagatacaagattgaccttagaaaaatctaaagaaatggttgtttagaatatcccaacttgaattatctggcaaatgtacgtatcacagatatgaaaggaaccttgtttccctcctgagagcaaaacccagaacctccaagcaaaacccaggacctccaaagtcgtctgtggaaggagtatagctggagtaagacagcagggagagccaggcgccatggctcacacctgtaaccccagcactttgggaggctgaggttggcggaccacttgagatcaggaatttgagaccagcctggccaacatggtgaaaccccatctctactaaaaacacaaaatttgttgggtgtgatggcgcatgcctgtaattccagctactcgggaggctgaggcaggagaatcacttgaacctcggaggcggagtttgcaatgagccaagatctcgccattgcactccagcctgggagacaagagcaagactccatctcaaaaagagagcagtaagaccagtgggagagggcggttggccagccttgacagtgtttcctgagaggacacttctcaccctgaatgctactgcctcctgcccacagggtgttgctgcttctctttcatgctttccctagaacttcaacaacagcaacaaaagctttatagatatttaaggagaccaaaaaggagaaagcctgaggaagagccatccacttaggctgctcctcatcctactggaatgaggaagtgtagcttggattcccagcctggctgacttctccaagcgttgacatctgtcccaccccatggggccaacacaccttcccaggcacctgcctgagtttctcatcttcgaagtgggcataatactatattgagagggttcatctatgtaaagtgcctgggacagtgttgacaccctgtatgtgctaattttaatagcagcagcagcagctgtagttattagtgaagataatgggtgtggaacatgaacatttgttttgacatgtagggttgaaatttatgccaagagcctctgcctaaacccaagagtcccaagagtgtctgggatagactatgaaaaagcattaaaagcctgatgtctgtacagagatcacacaaattggcctgtagatgatttttgttgaaggggtggtgacagagcagtaataaaaaacctaagttgttcttatccactgagttgagtctttagaacccagcttaatattttcatggctcagatttattttgaatcttagcttttatttagtgctttaaaatgggagcagattgggcttacgaaaggatgcaaaacttgccctgacattaaatggccccaattgctagcctcttcagttcttatatctcaattataattttttatattataattgttggcctgtttcctcacgctatgcttttagcagccagatcttattgcttagaaagtgattaataaatgttggttcattagtaatgtttggttaatgactgtaaatgctttctcattttccatttcccctctttattgttaattgcttctaatctataaactgggaagacagatgtcaaatcttgtagtagtgtatgcagctggaacaagtcagtactgggaaacagattattttactcttggagcacctgcccatgtggagctccttttgaagaaagccgatcatttgaccctgccaccatggagcagagatggacagcaaacccaacaacagttggctatagactgaaagccaaggagtcagtctccaaagaacatcagaaaccaatggaaccaatcaaatcctctcttttggagagtttgaatgtgagtctcaagaggacatcccatgctgaggaggttgaggctaacccatgcagagataaggcagcaagcaagcccttaggtagagcgaggctgtaggaggagtagccgtggaggcagagtggctttgttgcctgatggtggaacctcagagtcaggggccactgggcaatgctgccagcatggagctacagtaattccaaatgactcctaaccatgtcctgctgacttccatgactgttagaaggaaagttggtgctgcctagttgttcccttgcatgtggctgtgtgggctgttttggtttatttgtttaagaggcaaactgtggagaggtaaagaactttcacttactctaaccagagtatccttattttctagaacactttttaaaaatttaagcatttgatatatggaacctggtatagatattaaaatgcactcaagaggaaacatgcttttgagctgaggtcctattttccagcttcttttccttttttttttttttttttgagatggagtctcactctgtcacccaggctggagtgcagtggtgtgatctcacctcgctgcaacctccgcctcccgggttcaagtgattctcctgcctcagcctccagagtagcggggtttacaggcacgtgccaccacactcagctaacttttgtacttttagtagagacgggttttcaccatgttggtcaggctggtctctaactcctgacctcgtaatctacccgcctcaggttcccaaagtgctgggattacagtcgtgagccaccatgcctggccagtttcttttccttttattttgggtctggcaggaggcttttatattgtctcccaggtgtgaggactagtcactgtatcatgcttgtaaagaatgaaatgggtttggaaaaagaaaaaaaaaacaatttcaagttgctactggctttaaaaatcctactcagagtatcagctagcacagcttttagatgctcaggtcaaggtcatggaatctctctttcctcttctttgctttctcaactcttcaggtacacacacccccatccacttcttccactgacttctcagactgtcttccctccttaactctttccattctctgtgttcttctgacacaatgtaatacttcccagcaccaaacattattacactgtgttgatagataaagaacccaaggtgctggcctgagagacagagccaggctcagtgaggacattcattgccagctgtcatgggagagtggatggagattgtagcagtgggctcaagaaagtcagaaaacaaaggctttctaaacaagtggaggagaaatctagaagtcataaaggaaaaatgaacacatctgactacataaaatatcttaaaactataagtggaaaaagataccataaacaaagtcagaaggcaaatgacagagtggacaaaaatattagcaacacatgtaacagataaaaggtaaatgtccttcctatacaaagagtgctctacagtttaaaaaggaaatatgaaaggtccaatagaaaaatggtttgaggtttgaatagacaattcacagaggagaaaatgcatacctccagaagacataaaattatgcttagcattactttagtcaaagacgtatgacataaaacaatcaggtttttgtctgtcagattggataaaactaaaatgacagataagagtaagaaaatggctgcattgatatagttagtggagggtacatcacacaaccttttggaatagagtttggccatgtcaattaacattaccatgtgccctactcagtgatccagcagatctacttctagaaatctggcatacagaaaaactcatgcacatgcataaagatacatggatgagattttcattgtagctctgggatataatagcaaaaatggaaaactgaaatgttaataagggaatgtttaaataaaccatgcatggtgcatggttaacctaggcagtagataaaaagaatgaggtggctctacagacactaacctacaaagatgttcatcgtatattaagtgtaaaaagcctgttgaaaaattggataaacagcatgaatcaatttctacactttttttaaagtatgaagaaatagtgatttatgggtaggtatgcagggataaatacagagcaaatggttaacagcagtttaatctgagaagtggaaagtggggtcttgtgagactttgtatagttctttctttctaagcacagttgagttatgggaggttttgctttatgtgtttttcactaactttctaaaatatctcaatgacaaaatatggtacaattgtaaggacatttgtgataactgatcgatctgttatatgcctattttgctttaggcactgtactagagtgattccacaagctaattttatcttcatcactccctatgcaatacatattattattagaaccattttgcaggtgaagaatatgaaacttaaagagctgaagctacttgtacacagactctggctgtggtcatggcttataggcaatttgaagcaaagatgttggcaataatgtaacacccagggtgctataaggactagattgaaagtctgccatctgaggaactctctttaaagcacatgaatagtccttaaaaactgggtctcaatacatccttccccagctgtggtcaagtcccccttcttttggcttttgatgtcctggctttgtaggcttgctgtactctagacaaggaatgcaaatgagtgttgaatgagagtaggggtttgaagtcccaagcactagaaggcaaatttaccttcccccacttaatcctgggtaagcaaaactgaatggtagcccaggtatgtcagctgccctcattctcggcaacacttccaactccttttctgcctctttcacaggacaaatctccagctgtgaagtccccagagacaccttccacaaagctggcagcctttgcccagggctgtggcaattactccaaatgttgggagagtccaaacctcgtcttctaactttgtgtataggggatctctgtcttccatgctgggggatgggagaaaggggttgagtctgcatagggctgaagctgccagcaagagctgggacccaggagagcaggtgagaagggaggggtcagggcagccagaaaacttgtggttctgaaatgaatctgcatgagtcatttgtttaaaaagggcggagtttctggagcccccagataaacctggggaatagagtagaccagaaaagacaaaatacaatgaaaggatcaagggacagctaaatgcctgagataggcccttggcttgtgcttaaatgatccgtgtaggtgtgtgtgtgtgtgtgtgtgtgtgtgtgtgtgtgtgtgtgtgtgtgtgtgtttagtgaagtctgccaagctctcatgacttgattcaagtatcaggtcacctgtcccaccaatcaaatatccttatctttcggttggagaatcttccctcctccctgattccactccccagtgcaggctaccgtcccagctttgttaggggataggcaaattgctcaagatcattcagtctcacctaccaagtcaggactgctttcctagagcagttagcccgcctcagctcagctcaggtggcctttggaaaatccctggctgttaccagatcacggccttcaatttttttttttttttaactgcaacccttagtaagaaatacatgttatatcataacccagttcataggtgtgcatggccacacatacacacaaacggacacagaagtttcaacaaacagtacttacttaatacttagcccaattatctgattcttttccattctattctttaatttttcatttaaaaaaaatgtttgtaggccgggtgaggtggctcacgcctgtaatcccagcactttgagaggccaaggtaggtggatcgcttgagcccgggagtttgagatcagcctgggcaacatggtgaaaccctgtttctacaaaaaaatacaaaaattagccaggtatggcggtgcgtgcttgtagtcccagctcccagctactcaagaagctgaggtggaaggattgcttgagcccaggaggtcaaggttttagtgagccctgatcacatcagtgcactccagcctgggcaacagagtgagactttgtctcaaacaaacaaacaaacaaacaaacaaaacgaaccaaacaaaagtaacaacttgcaattcattcagttaatttcaatacctatgagttaagatgagcagattgaaatacacattcaagcctaatctctgaattatgcagagattttgagaatattccttcattagccacagccatgtgtgccacacaggagaaaccaggttgacgggcaagtcgtggtccaaggtcatccatggaccctcattggtgagagatactccctcaccagagagttgagtgtattgagtcatatgatgaatggggccactgtagttttagaataaaaatatgatttattttctttctttctttcttttctttctttctttctttctttctttctctttctttcttctttctttctttcttttctttctttctttctctttctttcttctttctttctttcttccttttctttctttcttccttttctttctttctttctttctttcttctttctctctctttcttttttttctttttatttttttgagacaaagtctggttctgtcacctaggctggagtacagtggcacaatcacagcttaactgcagcctcaacccctggactgaagcgatcctcccatttcagcttcccgaataggtaggactgcagacatgcaccaacacacctgaataatttttgtaatttttgtagagacgggggtctcatcatttgcccaggctggtctggaactctaaggctcaagcgatccacccacctcagcctcccaaagttctgggattacaggcttgagccaccctgcccagccaagattagctactgagagctttctatgtgccaagcattgttctaagcactttacacgaattaacgtatttaatcctcacaataccaccatgccatatgtagtattattaatccctgatgtatggacagttcgggaatttaacatccagaaaatagttactaaatatggatccaggtatcaaagccaggcagactggctccagagcccccagctcttctgcatcacatgtacctccccactacagcaggccttctcggaccttccacgactggctcactttgccatcttttccaaggatagtgtccagtgctgagctcagcaagctgtggccagaattccacagaggacttggactagagctggagctccagtgtggtcaccaatccaggtgatcatttcattagatcagtccagcagagcattcgttcaacacccacttactaagccttcaaacccagaagttcagggctggaagacactccagaaatttccaactacttagggactttcatacagggtaaaagggacacagggatctctctactccaagacttccacttttatctgtttcagagatagagtttctgcataagcttatacttgaaaaaaaatagtcttgctgttaaaacaagtttattttgggggaggtgagagaaaattttaaggaattagcagtcttttgggaaataattgatgacacgttttttagagtggtaaaatacatataatgtaaaatttaccatgaatgacagtgcagtcacagtattgtacaatattcaccacattttcatctcccctacggaaaatcccatacccgctaggcagtgattccccattaccttttctcctcagttcctggaaaccactaatttactttctgtgtctgtaaaattgcctcttctggacatttcacataaacagaaacatataaaatgtggccttttatgacttgttcttttacttagtataatgtttttttttttcgagacagagtctcactctgttacccaggaggctgcagtatagtggcatgatcttggctcaccacaacctccacctccccagttcaagcaatgctcatgcctcagcttccctagtagctgggattacaggtgcatgccaccacacccagcctcacttagaataatgttttcaatgttgtagcatgtatctgtacttcattctttgttatggctgaataatattccattgtttgagtacatatttgtttatctgtttatcagttgatggacgactgaattgtttccaccttttggctgttgtgaataatgctgcttgctatgagcatttgtggatgcatttttgctcgagcacctgtttcaattctttcagttatattatttttatttatttatttcttattgagacagggtgtcaatccgtcacccaggctggagtgcaatggcatgatcttggctcactgcaacctcagcctcctgggctcaagtaatcctcctgcctcagcctcctgagtagctgggactacaggcataaaccactatgcctggcttatttttgtattttttgcagaaaggggtttcaccatgttgcccaggctggtcttgtactcctgggctcaagtgatctgccctcctcagcttcccaaagtgctgggattaaaggtgtgagccaccgggtgtggctaattctttcagttacatacccaggagaggaatggctggatcacagggcaattcttgtttaagttattgaagaagtgccaaattgctttctacagtggatgcaccattttacatttccaccagcaacatatgagggttctaactgctccacatcctcaacaacacttgttattttcctttataaaaaaaattataaccattctagtgggtgcaaaaatagtgtcttattgtgtttgtttatttgaatttccctaatgacaatgatactaagcatcttttatgtgcttcttggccattgtataacttctttacagaaacgtctattcaagtccattgcccatttaaaaattggttgtctttttgttgttgagttgtaggagattttcatatattctggatactacaagtccttatcagatatatgatttgcaaatattatcttccattctgtacattgtcatttcactctcttaaaagcatcttttgatgtttttgattttgatgaaatccaatttatctaattttttctttttttttccttttatttatttatttatttatttattttttgaggcagagtcttgctctgttgcccaggctggagtgcaatggtgcaactctcgctcactgcaacctctgccttctgggttcaagtgattttcccacctcagtctcctgagtagctgggtctacaggcacgcgccaccacccccagctaatttttgtattgttagtagagacaaggtttcaccatgttggccaggctggtcttgaactgctgacctcaagtgatctgcccacctcagcctcccaaagtgctgggattacagatgtgagccaccatgcccagcctctaattttttcttttgttgcttgtgttttttgtgtcatttcttaagccaatgccaactctgaggtcatggacatttacctttatatgttcatgtaagagttttatggttttagctcttacatttaggtcttttgtccattttgcattagtttttgtatatggtgcaatgtagggttccaacttcattcttttgcgtgtagatacccagttttcccatcataatttgttgaagaggctcttctttccctttgaatggtcatagtagtctttgaaaatcagttgaccatggatgtatgaatttatttctagactcttaattctatttcatttatctgtatgtctgtccttatgccagtacatgtacctgatgattactgtagctttgtacgaagttttgaaatcaggaagactaagtcctccaacttagttctttttcatgattgttttggctattcatggtcccttacaattccgtatgaattttaggatcatgttgtctatttctgcaaaaaggcctttgggattttgatagagattgcattgaatctgtagattgctttgtgtagtattgccattttaatattaagtcttcaaatccacaaactcaggatgtttttccatttatttagatcttctttattttaacaatgttttcattgtattagtctcacatcttcttggttaaatatattgttaagtattctattttttaaaattgtttaaagttttttttgagacagggtctcatttgcttgagacagggtctcattctgtcacccaggctagagtgcaatggcaccatctgggatcactgcaacctccacctcccaggttcaggtgaccctcccacctcagcctcccgagtagctgggaccactggcatgccccagcacgcctggctaatttttgtatttttttatagagacagagtttcaccatgttggccaggttggtctcaaattcctgggttcaagccatccgcctgcctcagcgtcccaaagtgctgggattacaagcatgtgccaaggtgcctggcatattctattttccacccccctacaaagtaatagaccttattttgggagggcagttttaggtttacagaaaaattaagcagaaagttccagtatacatcttttaaaaaaattttttttttggtgatattatacaacgaaattgttttcttaattttcttttttggattgttcattgccttacatgtacagaaatacagctgatttttgtgtgttgatcttgtactctgcaactttgctgaatccttctattagttctaattgctgttaatatttgacgcttgccctagtccatataccatctccctgccatttaattgttgaagaaactaagtggctaggacttgcccagggtcctgctgccttttatggctgagcttgggacaggcttagcactttttcccttcagagctccaactcactccttaaattgaaccccagtttttcagtgtaatttgcaggtacaaatttcagccagttgcctctacaaagcccctgtccattccttccaaatccctgatctcttcctattcatttgcccccatatgcccattatcatgagcccagcgtggactcccacgcggacccaggcccccagccctggccacagggtcacagagataactccgtgggaaattataccccatggccctttgctcctgactccccacgtggagcagagaaccactcagatgcgtgcttccagcccccacctcggacgacccgctgtccccctctcacggctgtttgcccgggcgttctaggatgctctggtattagagcaccctgcctgttcctggccccctgagcaccaacaagcccgtctcaggcctccaaagctctgcatacgttgccctggcaaggtcagaccctttggctgcaacacgtccgtcaagaagccaggcaaatctagcatgcaaactaggatcattttcgggcgttggggcccccccgcttgaaatctggtttccatgttcacaaaacgcagcccgactggtggaactcgcgactccagacgcagagaagctgtgggcagaggcggaggcagagggtgggaatgcagcctggcgttggagtggggagaaaggggagggaggaaccgcgcgcccaggccccgcccggttgcctaggtgacggggagcgagaggaagaagtgggggctgagctgatccgagcatttcagatcttaatactgaacagctcagccccccaagagggagtaggatggaagccccaagccaagggagtcatcttcattattttaccctggtacctagtgttctgctgctcatggagaaacagaatgtcagtcctggaaaagagcttgcgaagtctccttgcccagtggttttcaagcaggtttgtagctaaagattctcgtttcaaagaaaaccttaccaagaacctcagtttgcgaaacagacctatagggagctaagtcaccccacttcaccttcccagattgtggaaaaactctggtctgggcccaaaccctccttgtagagatgggaaaactgaggtccccagacaggcactgcattgcccagggacacccaggacataaattcgctgcagaaccaggattggaaacgatctcccagtgatcaccatagagcaagcatgaagaagcggatcctttgaagtagctgggaagagaaaaggcacacaggatgttttaggaacctggaatttccagacctgctgagacaacacaatccccttattttacagacgaggaaactgaggcccagaaaggaggcagtggcaagttagtagagtggtcctaagtggagtaatattcccttagaaagaagatgcatttgagcatttggctttttggctagctcaagcaataaatctttgctgaaattctgaggtgccagatggcgcaggggaggagcactggcctgggagtttcatccccctctgttactgacgaaccccatgaccttgggagatttattttaaagagtcaaagggatcatccccaggtttgtaagaggtccagaagagtaataggattaaacggtgcttcagagtgttttatattgtttctaaatgtcagggcctctttgggggaagggaagtaagcacactgctctttaaagactgaatttgacagtgggttttttaaacgctctttatttttctttttcatttttcatggctaattataaagtaacacatggccatttcagaaaatgtgtaaagtacagaaaatgaaaggaaaaaaaagcagaaaggaaaatcacccataaacacatcacccagaggcaaccattgttatacattgttgtacatttcctttcagtcttttttctctaatttttttcttgtgcagcgtaaattgtatttttaattatgttgtaatttttaataatttcatttaattgtttaataattaatattaaacttagaatattaaagctaaagatctgtctgatcaccacccacagccctgggttctttgatgtattaattttgcagaccatttaatttttttcccacttatttacactcatttttcatttatttatacctatttcatttatgtagacccacaggaaatgtacagtgtaataataaatgtatatatatatattatattgtatatgtgttttacacaatggtataatgttttctctgcaatttgcttttttcttttttgctcatttgacacctatattattcaatcttatgtataagccactttgtatctacccattttgttcttgatgagcatatacattggttccaattttttgctactgtgataaattctacaatgaataacctttgcatgttcttctgcacaggggctagtgtttctctggtggtagatgcacggaagtagaattgctgaatatgcatttatttacttttaatccacactgccaaattgccctctaaagctactgcgtataatgagcatccttgttagcttataacactgctttgcttgattataagacttcacttttttaaaaaaacttaaattttttagaatctactgagtgaaaataatttatttttgtatgattttcctgattattagtatgattaagcatattgtttactggctatttaaaaaattagtttatagagttgctttatatatttaggccactatctttttttctgtatctatcacaagcattttcctcagtctgctgattattttttaatcttgtttgcaatgtcttttgacatgcagaattttaaatacttaatatggcaaaatttatgtattttcctttatagatttttgttttttgttcaaaaagatttgatctacgtttttcactaataatttaaagtatctatttacttatcttttttttaaacattaaaacattgactccatctggatttattttggtgtatgtatgtgataggaatctaattttgttgctttgcatatgggtcgttaattgctttaataccaattattgaatagtcttttttccactgattttgaataccacctctatcatataccaaatccccatataaacgcagatctatttcctgaccctttactcttttccatttatccatttatctccttttctatttttatgcaaatactacactgttttgactattgatttataatgtatcttaacagctgatgggcaatttacccactttttctgtttcattgccttggttcttcctgtacatgtattcttccatacgaattcatttatgaaggtctgtgaaaagtcttttgagtaatttgattgttattgcatcaaattcatacctagattttgagaaatgtatctcgaatatagcgtctttctatccaagaatctgacatgttgatttattgggtcttttaaaatgtgttttagtcaagtttaaaatcaccttcataaagatcttttactaaaatttttcctaaagactttatagtctttgttactattgtttttttccaattacattttctcatagcttatacttgtaagtagaaaggcaattaattttggtacattggtactattaattctgacagtttgttcattggttcttttaggtcttctagagaaggcaaccaaatctcatctgtatataattaatgctttgctttgtcttcttctcttctaatatttatatgtctattttggaggtaatcttattgcatgaagttgggtatgatgaagaaggggaatagtgggtattctaatcttgctcttgacattaatgagaatacatctaatgatgtaccttgttagtaggctcagtgctgtaacagaaaactccaatacctcaatggccaaacacaacatactggattaaggtgggccctaaatccaatatgactggtgttcttataagaaaagagaaatttggaccctgagacagacacacagggagaatgccatgtgatgactgaagcagagattggagtgatgtgtctataagccaaggattgctggcaatcatcagaagacagtaagaggctaggaagccacctccttcagtgagaacatggtgtcaccaacactttgatttcagttctagcctccaaaactattagacaataaatgtctattgtgttaagccacacagtgtgtggtaatttgttatggcagccctagggaaccaatgcaaaagctaagttaattcatcattagtctttcttgctttatagtaagtgcaagtaagtttatatatttccctgaagactactttaacgtcatcttaaagtagtacttcagttaattctaattttattgtagttttttgtcaactcattaattatttagacctgtgttttaaaacttctcggtgtatacaaatttctagccatcttcctgttgttgttgacataaaattttatcattaaatgttttatattatttcactttacttacttacttattttttgagatggggtcttgctatgttgctcaggctggactcaaactcctgggctcaagcaatcatcctacctcctcctcctaagtagctgggactgtgcccagctatatcacttaaaaaatttttttggaacttactgtgcagttaaatacttagtcaatacttagtcaatttttataaatgttccatttgtatttgtgaagaatgtacattttctattcaaagttctacatatatccattacattgacaggtcgtctgttctttgctgtgttaaagactagctaattgatgaacaaacttgttccccttcctcctgggcacacaactaggctacatttcctggactttttgcaattagatgtggtcttgtactgagttttggccaatggagcatgagcagaaattatgtgtgccacttccaggcccagcttacgtgtgtttctcctttctgtctgtcactatgaatgccaagatctcaacacacagagtgaccttggcaactacatgttgaaggtggcagagtttctatcagcttgaattcctggcagagacccttcctccgtgccccacaaccaaacattgaactttacatgaaaaagaaattaacctcgattgtctaagtgttcagctactcttagttaaaagtttatttgctacagttgctagtgtgacttaaactaatactgttttgctctttagatactctatacttttttgtcttcttgatttgtcagtgtctgatgaatgtgtgtgagtctctcaatataaatataggtctaggctgggcacagtggctcatgcctgtaatctcagcattttgggaggcagaaataagaggatcacttgaacccaggagtttgagaccagactgggtaacaaagtgagaccccatctttacaaaaactaaaaaattagccaggtgcagtagtctgtgcttgtagtcccatctacttgggaggctaaggcaggaggaccccttgagcccaggagttcaaggttatagtgaggtatgatcatgccactgtactccagcctgggtgacagagcaagaatctgtctaaaaaaaaaaaaaaaaaaaaagaccgggcacggtggctcacacctgtaatcccagcactttgggaggccgaggtgggtggatcacctcaggtcaggagttcaagaccagcctggccaacatggtgaaaccccatctctactaaaaatacaaaaattattcgggcatggtggtgtgtgcctgtaatcccagctactcaggaggctgaggcaggataatcgcttgaacatgggaggcagaggttgcagtgagctgagattgcaccactttactccagcctgggtgacagagtgagactccatctcaaaaaaaaaaaaaatacacagacacacacacacacacacacacacacacacacacacacacagacacacacagctatatgattccaattgtatacaaattataaattatttagtaatccataaactcttgctgtatatttcaaagctatgttgttagatatgtaaactcgtgttataattttttggaaaagtattccttttatcagcatgaaaattatttttgctgatatttgccaggttttaaccattttatttattcatgttttggaagcaccagggtccactaagacattttatttataggtatgtattacacccctagaaaaagaatcccaggattttccctcaaatgtgttattgtcttgctttttcttatggtccatgatgccagctgaggttgttagtacaatgaattgaaactggtgggatgaaagcaggttattctgccgtttttctagatctttgagttggacattgatatggtttggatgtgtgtcccgctccaaatctcatgttgaaatgtgatctgcagtgttgaaggtggggcccagtgggaggtgtttgagtcatgggggcagatgacttaagaatggcttggtgccctccttgccataaggagtgagttctggctctgagagttcatcgagatgggattgtttgaaggagtgtggccccctccctccatcccttgcttccattcttgccatgtgatgtgcctgctcccacttcaccttgtgccatgagcggaagcttcctgaggccttcaccagaagcagatgccggtgctatgcttcttgtacagcttgcagaactgtgagccaaaataaatctcttttctttatatattacccagcctcaagtatttctttatagcaatatgaaacggaccaacacacatcaaatctggggctgatcactccacacttgtttaacctgcctgtgaggttcactattttctcagctctgtgatcatcaatggtttcaaatcaccaatgtagccatgcttcatcatcacagttagaaactggatgatgactttggagaacggcctaataagaacctggcatttactcctcttctcagcattgttgatgctcttgagagcatcaaccaggacattcatgtgcaccattatggctgctgggtagcctcaccctcccaagctcccagtaaagccccagcaatgagaagctgcactgcccacctggccacaaatccccagtgctgcctgccccaggccaaggcactgtcttagttgctaagaggagccaggcactgcagtataagcctgggctaccgcctttctgggcggttgaaagttccagctctcaccagtgctgcagcctgcacttcatggacccgggtccccagaatgtggagcatggggtgtctggacatggctctcctctatgcctgtctagggccctgcaaggccaggattcctgcccagtggggcccagtgtccttgaagagcactgaacctgagccttagattgcaggatggtgccaatgactgatgatcttaaccattttgaagtgtaaagttcagtggcattaaatacatatgcattgttgcacagccattactaccatccatttccagaaagttttcatcttccccaactgaaactctgtacccattgaacgctaattccccattttccccctcctgccctcccaactgccattttactttttgtctctatgaatttcactaccacatatagatggaatcatacaatatttagcctttgtgcctggcttatttcacttcgcataatgtcttcaaggttcattcatgttgtagcatgtgtcagttcttcattttttttgctgaataatattctattgtaacattcttttctttaaaaaaacaacaggttgggctgggcgcggtggctcacacctgtaatcccagcactttgggaggccgaggcagggggatcacaaggtcaggagtttgagaccagcctgaccaacatggtgaaaccccgtctctactaaaaatacaaaaattagccaggcgtggtggtgcgtgcctgtaatctcagctactcgggaggctgaggcaggagaatcacttgaccctgggaggtggaggttgcagtgagttgagatcacaccactgcactccagcctgggcaaccgagcgagactccatctcaaacaaaaaaaaggtttattaagatacaattcacataccataaaattcacccttttaaagtatctaatgatggccaggcacaatggctcacacctgtaatcccagcactttaggaggccgagatgggcagatcacttgagcccaggagtttgagacccagcaacatggagaaaccccgtctctaccaaaaatacaaaaaaattagctgggtgtggtggtgtgcacctgtaatcccagctacttgggaggctgaggtgggaggattgcttgaacccataaggcagaggttgcaatgagccttgattgagccactgcactccaacctggataacagagtgaaaccctgtctcaaaaaaataaataaaatttaaaaattaagtatatattgggcattttttcatacatttacagagttgtccaaccattaccactatctaatttcaggacattttcatcacccctgcagccattagcagtcacttctcattttcccctccctccaggacctggcaatcattaacgtattttctgtctctgtggattttccccttctggacatttcatgtaaatggaatcatacacagctgggcatggtggtgtgcactggtggtcccagctgaggcaggcagattcttggagccccagaatttccaggctgtagagcgtgatgatcatgcctgtgaacagccactgcactccagccttggcaacatggtgagacactgtctctgaaataagtaaataaatagggtcgtacaatatatggcctgttgtgtttaacttgttttgcttataatattcccaaggtttacttgttatagcatgtatcagtacctcattcctttttattgttgaataatattccattgtatgagtataccacattttgtatatccatctaccagccaacggacattttagttgtttccaatttttagctattatgaatagtgctgctatgaacatttgtatacagatttttgtgtgaacatatgttttcacttttcttgggtatgtaccaggagtagaattgctggattatatagtaactctatgtttaacattttgaggaaccgccaaatagttttccaaagtggctgtactattttacaattccatcagcaatgtatgagggttccaatttttccacatccttgccaatactttttattgtctatcttttttattatagcaagcctggtgggtgtagtgaggtgcctcattgtggtttttatttgcatttccctaatgactaatgttgaattcttttcatgtgcttattaacattcatttttaatgcacatatgcaagtatattttaaagaactaattggtatctatgtcttcactgtcaaaagacaaaattacaacaaatttagtttaaacatcttaattggctttattcgcatttctagaatcaggcaacactttattccacaaaatagaataagtattctgatgagctgagcagaagaggttggtttttataggcagagaagagctgaagaaaccagaaacaaagaatgaaaagtggactggtaatttcacaaagttactttttttgtaaggcagggacagagagaaagaatagtggaaaggtaactgattggttaacttcaggttacttttttggtagggattaaagtggagggaacttcattatcagctgattgtaactggcctatttggggaattggctgttatctctctcctcttgttaccaaaaggtaacaggtctaggtccttggtctaggtcctgctgctcacagcacagaaagccaatgactgaggcaaaaagtgttgccaagaaagaaggatttaactgagagcttcagctgaggagaaaggagatcagtctcaaatccatctccctgattgactaaaattaggggtttatataacagggaagaaatgtaaccacaagtgggaaaacaggaacttggggtaaggacacaatcatgatgaatgaggggcctgtcatctcattgtctgaatactatgatctcttgagtttcatttatttgatacttcttgagaagccaggggtttctttcctgaagaaggaactaataaaacaaatgtacgtttcaagctttaagaccagaagtgtccatttctatgtttatcaaaaaaaatctatgggactgttgggtcggtttcatcctgatttctcagaaggtccgataacaacttactttctgtttggtgagatggaactttagcatgggtgactccattttggtttttagcctggcctgttgaggcctagggcaggagctttgttcaaaacaatggcctcccatcattatgttttaccatcacccaaacaaggcaaaaatattaacaggaagcttaatttcattacctccactttttgtggaatattcctatgcatactcagtatgctaacctcaaattttagttccaggttgttataacttttcaggaagttatttagataaaaataagatttattcaatcattttaagaaattcacagctgagtgtggtggctcatgcctataatctcagcactttgggaggccgaggcaggaggattgcttgagtcagggagttcaagaccagcctggacaacatggtgagaccctgtttcaacaaaaaataaaaaatagctgggcatggtggtgcacacctgtggtcccaactacttgaaaggctcccagctacacccaggattgcttgagcccaggagttcaaggttgcagtgagccatgtttgtgccactatactctagtctgggccacagagagagaccttgactcaataaaagaaattcacctttggtttttgcatgccactgtttcctcttgggtttttttcttaactagagtacaacatctaattgcttttctttttccccaaaaaggatctggaagggaaggagtgagtaaatcttctgagtatttttatgtttgaaaatacctgtatttcatcctcacatttaaatataatttggctataaaataataaactgaaatatcccttactttagcattttgaaggtattgaatttatgttgctaaaaacatctgatattattcttttctagtgggtacatctaatttttttttctctgagcatttagaattttttctttatctttgatgttgtgcagtttcactatgatgagtccagatgtgggttaaaaaattattttattggtacctagtgaaacctttcaatctgagaacctactttttaaaaaatactggaaaatctctagttattatttctttaaatgatactttctccctgttatctctggcctgtaattctagaactcttattagatgaatattgaatctattcgctatatctttaccttttgtttctttttaaaatccatctctcttacttcgtgttgcattctgaaagaattcccataccacatcttccagttccctgattcaccctttaactgtgttcattctgctactagcccatgtattttttatttcaataattatatattttattacaaaatttctgtttcttgtttacaaccagctattcctgtatcatgaataaaatactttcttatctctctgatgatttataatcacatttatttttaagtctagttctggttttccctattaactctctttcttcaggtgtgcatttgtccatctgctggatctgtgatctcttttttatagtattgcactcctcatgcatttggtgatccttgactgtgtgcatttttgagttgcaatgtcttgttaggctgacagctgcctttggttgagctgcctgtgtatagagaagagcaaaacagttactgagcttgtgcctccatacaatgttgataggcaggacctgctgctaggtgggaagctcagcagctggtcttttaggcttggatgtttctcattcctcccagattttgacagccactcaatacatgaccccttctcattaatccaagtccttgccccctaaactcttacatgcagggtaggtggagaaatccaaggctgataggcctggctgctcctgctacaggtccccagttaattcccttgtcaatttccccggagtatcttttgttccaactttcttccatcacctctggacatgggacatcttagtgttgctcctccttttgaggtggttcactgcagctactgtatcctggactagaagaaaaaaattttccttttgctataaagcatattattaggacaataatgagtttatgtctgtggattaagtaatggtgatatggtgtcatatcatcattaatttcctgattttgattattttcaggtttaaaaaaatctctatttttagaaaaaacacattaaaatattcagggataaacaaaccagaacacacacacacacacacatacatatttttatgccattaaaaactcttccataaacatccattgtaaggcctgcctaagactccactggctgggtacattataaattgcttaattatgaccttcattttgccatttctattatttctcatttgtctctatgacaagtaatcctgaaatgaacactcatatttaatactttgtctacatttcagattttcttcctttgaataaatccatagaaatgttaactactgcctaggggtatgaacattttaagattcttgggccaggtgtggtggctcacacctgtaatcctaacacattgggaggcctaggagggaggattgcttaagcccaggaatccgagacaggcctgggcaacatgatgacacctcacctccacaaaaaatacaaaaactagccaggtttggtggtgtatgcctgtggtcccagctactcaggaggctgaggtagtcggactggttgagcccaggaggttgaggctgcagtgagctgtcatcacaccactgcattcaagcctgggtgacagagtgagatttgtctcaaaaaaaaaaaaaaaaaaaaaaatccttaatacatacttgattaatgtgaattggaataactcaatcatgttcgtgcatattctcattcatttcatttaaaagttttgctaatttgaggaggaaaagggaaattatatttcatgtggttttaattggcatttcctttatccctagagggggtgattttttttctcttaaggtagtggattttgtaagtgtctgctcctggttcctgaggggatttgtgacagtcacatattcctctcagggttgggaacagcaaagctgtttgtaacttctaagaagtaatacatggtgattatcatactagaacatgcagtcaaatcacttgtgacatatccatattacagcacaagattaaatcgacaatttatttagactcctagaatgagaaaacacaatgtccccagggaaggataaagagtgggtgacagaaggaggtaatttctttgcctgcttgtttacctactcccctcttttcttcctcccatctctcttccttatattatatgcatatataatatattgtatatagatatacatctaatgtgtacattctcatatatattataattataatggaattataaatagtccacgataatataatatatgcatgacgtttccaggcatcaagaagatttacagctataaagccagctgtctttcctctggggcatatactgtagtgaaggcaagaagacacatgcctcaggattgcaatgcaagggggctaagcttggcttcagcacctttacaagcattctcaccttacctaccaacctgagctccaccttttctctgaaaccctccttgcttttcttgctcagccccttgctgtgcctggaattcccttatcttattacctctcatctaacctaattatccttcaagggctgctcagatgccacctcctccaggaagccttctctgatcccctactcttagatgcaaggctgtctctttctgcacgctccacctctccaatgggcttggcactttaaacttggcattgtggctgttgctgtacttgtcttgtgtcctcaattctaaactcctagagggcaggacctgatctgatgcagctctgtatccccatgttacatacctcagctcctagcatagaaaaggcaaactgtaaatcttctgataaaggagagaatgaacacatctatacagtgtccttcaatttcacagttttcccacattatctgcaatgtgtgccttgtgtgtaccaaatgggtaaatgttaaatgagcacccctcggtgactgcacagaggttggtccatgggcaagttcccaaaatgaaagcaggaactgggcatgtgagtgtagaatgggcacaggactgggaatcaggaaggtgccgggtttctaccccagctcggcctctacccagctgtgtgaccttggaagttcattgcctcccctctaggctttggtctacccatctgtagaatgggacttgggggtgacctccaatgcaagggtctttccttcttacacattcacccttctagcacagagtgtgtgtcaactgccctggcagcccctgaaggctcagtattcagaaaagagaaagtagctgggagataccagggctgacatgtgctgtctgttttctagaaggctatggagcttccataaagatatatttcatgtgaaacctttccccttttagatttcataagttattttatttacatacacttatatacatgtggcctgtcttaaaaagttatcatgaatgaaaggcaaccctcaggcacagcccagaagattaactgtcaaaatgtaaagatgagttcattttctatggaaaaaaatgtaaatgcataagaaaggacagagaagtttccacacctaactaataataatggtctcctttggggaggtggggaggaaactgaggttaggggctccaaaaaaactttagttttatcaacattcaattttttaaggaggatatgcatataattttatgattaaaaattaaataatgaataagttaaaaggcccaagtggtatttaatgctgcactaatataattttgagtcttgatacctgtaagggtatttatctttatttttatttccccagttccctctctctctctctcctgtctaaatgtgaggattggaaatcatttctagcaagaagagcttgattaaataaaggtgcttgatatggtttgagtctgtgtccctacctaaatctcacgccaaattataatccccagtgttggaggtggggcctggtaggaggtgtgactggaccatgggggtgggtttcccatttggtgctgttcttgtgatagtgagttataagatctgttttttgttgttgttgtttgtttgtttatttgacacagggtctcactctgtcgcccaggctggagtgcagtggcacgatcttggctcactgcaacatccacctcccgggttcaagtgattctcatgcctcagcttcccaagtagctggattacaggcgtgcgccaccacacccagctaatttttgtgttttcagaagagatgggttcttgccatgttggccaggttggtctcgaactcctggcctcaagtgatcccaaagtgctgcaattagaggcatgagtcatcatgcccggccaagatctggttgtttaaaagtgtgtagcatctctaccgtctttttctttctcctgctccagccatgtaagatgtgcctgcttctccttcaccttcccttatcattgtaagtttcctgaggcctcccaagccatgctttctgtacagcctgtggaaccatgagtcaattaaacctcttttctttatgaattacccaatttcaggtatccctttatagcagcacgagaatggactaatacactgctttaatttacaagaacactttgcaagaattaggactcctatctcctaagattatatatttgcatggaaaagaagcaggttgcttgaagaaaagaatcaagaatcaaaactttgcaatgaaggataaacttgaagtaagaataataaaataaagaatgtggctgggcacagtggctcacacctgtaatcccagcactttgggaggccgaggtgggcggatcacaaggtcaggagatcgagaccatcctggctaccatggtgaaaccccgcctctgctaaaaatacaaaaacaaaattagccaggcgtggtggcaggtgcctgtggtcccagctacttgggagtctgaggtgggagaatggcgtaaacctgggaggtggagcttgcagtgagccaagatcgcaccactgcactccaattccagcctgggcaacagagcgaggctccatctcaaaaaaaaaaaaaaaaaaaaaaaaaaaatgcagttcaggaagaggaggttgcagacatacttacagaagaggtaccatgctttctgggactgggcatcaagcctgcttctgaaagtcctggcagccagggagggagaaagaaaaatgcgatttcttccataatgcttctcatcagaaagaagaatgcattataattatactgaggggcaaagcttgccatgatatgctaaaagaattttatgtaggtatcattattattgtcccacgaagaaactgaggctcagaatgatttagcatcttgcctaatatcccctagacagcaagtgggatggcaagatattaacgtggtgcttttccgttaattatctttttcaatcctagtgacagcagtaagaaataggcattattgtccctgttttagagataaggacatggtagcttccaaaggttgatgtgctcaagggcatatagggaaaaggcaaacttggatgcaggcccacatcttaggacttcagtgccaggagttcacaaaaggcctctgcagcacctcctctcccattatcatgccctctctacccctccaagccactttgtccaaatactcaactgcttgctattctgcagacacacagtcctttttgcctacaattccccatcactggagtgcccgtcatcactgcccttcttggaaaagccttctcattcttcaacatctcaatcaaatttcattctttctttgctctcccttgtattcatgatcataacatcatttgagcacttctcagtatgcactgtagttttatattttaaaagtattgttagctgggggaggtagcttaggccttgtaatcccagcattttggaaggccaaggtgggaggactgtttgagcctaggagttcgaggctagcctgggcaacgtagcaagatcatccccatctttacaaaacatttaaaaataaaccaggtgtggtggtacatgcctgtggtcccagctgctctggaggctgaggtgggagtatcacttgagcctgggaggtaggggctgtagtgatctgtgatcacaccactgcactccagcctgggtgacagagcgagaccctatctcaaaaccattgtgctgctttttgagttgccatctgccatggaacaatcaccgaaatgcatattttcataaaaagttttacagagaagaccatccactcttgaggttgaaccctcagatatgatgaaacatgcaaaggtcaagatcaggagaaggaaggaattcctcctgatcagcctttgctgatctttgttggcaagcacctgggagattgtattcatccgttctcatgctgctgtaaggacatacctgagactgggtaatttataaatgaaagaggtttaactgactcacagttccacagggctagggaggccccaagaaacttacaatcatggcagaaggggaagcaaacacgtccttcttcaaatggcgcagcaaggagtacagagcaaagggtgggaaaagccccttaaaaaaccatcagatctcgtgagagttcactatcatgagaacggcatgaagttaaccacccccatgattcagttacctcccactgggtccctactatgacacgtggggattatcgagactacagttcaagatgagatttgggtggggtcacagccaaaccatatcagagattaacatgctttgtctgtctaccacatttgcaaagagtccactctccatcttgtgttgagatttcacaatggtgttaagaaaatgaagtcttgttggccgggcacggtggctcacgcctgtaatcccagcactttgggaggccgaggcgggcggatcacgaggtcaggagatcgagaccatcctggctaacacggtgaaaccccgtctctactaaaaatacaacagattagctgagtgtggtggtgggtgcctgtagtcccagctattcgggaggctgaggcaggagaatggcatgaacccgggaggtggagcttgcagtgagctgacatcatgggccactgcactccagcctgggcgacagagcgagactccctctccaaaaaaaaaaaaaaaaaaagaaaagaaaatgaagtcttatgcaactcccatggagaccaaagagaaagaaggttaagctggctgtcctgaaataccataaggtggatgagaatggcaaaattagctgtctttgtagggagtccccttcagataaatgtggtggtgacatttttaaggccagtcactttgacagacattattgtgggaaatgttgtctgacttattgcttcaacaaaccagaagacaagtaattgtgtatgagttaataaaagacatgaactaagaataaaacaaaataaataactcttgtcctctccagattctgagttctgtgaagatctggattttatctgaatcatctttatatgtccagtgcctagcattgtgtctggcacatagtaggtattcaataaatgtttgctgaatagatatgtaatatcaatgaaactgcccttgtcctggatggtgaaaggcacaccatgacatttgacagtatgcctatcccagaataatttataatttcattgaaaatatgagaagtgacacccatgaagaaattagagaacaaaataggtatagtcagatgccatattgtgtggtttaaattctgagtgctgagggggaaaagaaagatgacatctttggggtgctagagggggctttggggatgtgaacccccaaggtgtgggatgaagttcccccctgtagtaggttccatgatagctatgcaacagcattagttgctcaaataaattgaagaaaggctgtttctttgatacattgatgggcagagtgactctcaatgggaccatggaatcttagaccctttagtaagaaggataataaaaattgttttgccaaacaaaaaaggaaggggaagcccagagaaattcacctctgttgatttcaaccaatgttctttttgtaaaatttaatttgtgtaaaatgtttaaatgcatgatttaatttttaatgcatgatttaagttttaatgcatgatttaaattttaataattaataactttaatgtctatgattgaaggttaaaatttgataagcaatttaatttctaagcctgatatttctattttctcataaagtaaaatatgatgggattaaaggcaggacagactcacccttcctggtttgtgattgagaaggtcaccgatggtcataattgcctccttttttatgtgctgttgccctgctaagacatttcttgaaacacttcatactgtactcacccaaggtttctaaagctgtcaatgtcaattgcttttgttcttaccctaacacatgttgtcacatgagaaacataaagcctttcttgtgaagataaggtgagctattatgggtgcctaaaaagacttggagattaaggataccctctatgacagtcaggtcatggcaagaagcagaatgcaccctagatggatcaaatgaagacacttgaaagaaaaagatacttacacatgagccgataatagggcaccaacagtggatgttagggcactcagagactagcatctgagggatggggggagggaagctgttattacccttatatctgaaggaacaaggagagtaaatagtgttactggagcccagtatgagctgcaccaggaagaaaggaaccacccaagaggagctgtaggtatggggggtggcaaatactgccaaagacaggcatgacatcagggagacggagagggagaaaaagatttgatctcactctcttcctgtccccagtctcctgctaatgtcccctctggccatacccaaccagaaatgagctgtcaagggaggccaggaggtgcatccacagaggtcaggctttgtggcatggagcagggcagagaagagcagagaatagatctgagtagggtgtgtgtgtgtgttgccagggagcagggggtggccagccaggatgttctgagagcccaactagaaaaagccgcacatgatggatgccatcagctactctgaagcaactctagtcaggtaaccaaaggttgagcagacccaggattccactcacagtgctttggatattattcttgggaagcagaactggaatataatttcagttaaggaactctgattgaaaattaattgcattgtacccaatctgggagttgtaagaactctcggagtttggacagctggggtgagaaggctcggagagcaagaatttggccatgtgtctccaacactatccaggggagaaggtaggctcactataaatccccttcaagccttcccccaaaggggagtgaatgcattagactgtcatagctcagtgatatctgccatgaagaccattcgtttcttctcatggctctgattccagagtccccagaagccttgtgtttcgcatttgacttctcataaagctctgtgctgattagcccacaaagggttctgattctcttgacagctataactcattgtaaattaataaattggcgtctggtgtatctgatgaactagagcattctgaatcagggctttacatctcctcagtcacctcctgcttcatcttcagggaacagtcacacctagagtcaataactcagtgtctgaagctctgatgaggagtaccacattttgaagtgaggactttgcctttctgcacaacctcgccaggcagcctcaccagaacatgtctttacttcacctttccagctgtagtgggaagctcacagtacatactccacctgccttttcgatgcttgttcctaggaaagttgagaacccaaggttgtaaggggactgtgagactagccattccattcccctctatccccccgcccagatcattttttagaataggaaggagcatgatgagtggatgaatgcacgcatgaacggatgcctggatggatacagtgcatggatggagatatggctgcgtggctgcgcagatgaaggcgtggatgcacggatgtatggacggtgctgtggccagggctgctcttcaacacacactctgttcttgttgtggcagaggcttgggtgccctgtgccactgctgcagccatgttgttgtatatttccatgcatattattagtgccccacctcgggcatctcctttttctgcttcaggtcattctccaaagctgcagaaactcagcctaagtgcagagcaagcaggaagtgcagaggggtcaacatcctcaggggtaaccctcaacccatgatggatgaaaatccatgcttaaatgttccagcctcccatccttcaaaggaacaattctgagatacattctatatgattcctcagaggttcgccagcaggactgacctgtccacaacagtaaccaactcagcatcacgccctttactggcttttcctccttccctgcctcactctccccactccctcactcctgcttcctgggatcatctccccccaaatgctcaaatccttgtctaaggctctgcttccaggagaaatgaaacactggtcaaactggtctatttctcttcctctggaaggaagatgctggtatttattcatgcatatatgcattcctcctttccagatgagcaaatcaaggctgagaaagattaaggaactttcccaacttcacaagacaataagtgacattgctgagctaggtggataccaacctataggacaatccttagttatgggcctgcagaatctcacagctggaaggactgaggactcagaatcacctagtgcaatgtttctcaacctattatgaccttcccaaagagccttttaagacttttttttcctaattacccccatgacattttaatactaaaactgtattgcatatctaactatggacactctctctctctctctctctctctctctctctctctgtgtgtgtgtgtgtgtgtgtgtgtgtgtgtgtgtgtgcttagctagatattctttgtaatgttgacaattttaaataattttcagcagttgacataattactggtgggttgactcacttagaagaatgaaatagtaaaatataaattatttttatttatttctcaaggcttaagttacacacaaaagcactgaggatcaaacataagcaacacccacaaggcagctaatggcagccaataggcacacacaaaccagctgtcatgatggaactttctcatgcagcaagcaatgaaaagaaagtccccgcatcccaaccatctattcaccatagctttgcagcactgatcttgcatgcattttgcgtatctcccatgaacttaacatcgatgctgttcatttaatacccaagaaaatccaattagagaaataagcactaaggaataagatttttttgcctggtatggttgcactttggcaggctgtaaactattgtaatatctaagattttttttgcctccacaagaatcatgttttacccccttgggtgagctgagaatatatgatttagtccaacaccatcattttccagattagagggacactgaaggctaaaggtgcagtcacatgatgagacaaagccgaatggagtgaaaatcagatcttcagactccaggcacagagctcattttaaattacccaagaggcggagtgtggtggctcacgcctgtaatcccagcactttgggaggcctaggcaggcagatcacctgaggtcaggagtacaagaccagcttggccaacatggtgaaaccctgtctctactaaaaatacaaaaactagccaggcatggtggcgggcgcctgtaatcccagatacttgggaggctgaggcaggagaattgcttgaacctgggaggcagaggttgcagtgagctgagattgtgccactacccccaagcctgggcgacaagagcaaaactccatctcaaaataaataaataacccaagaaccttgctcaccagtcaatatgaattaggcctaggctcagctagtcttggtgctttccggccctcaatttttgttggggaataaaaaatcttcatttcactgtggaaggtatggtgagtattaagctgtgttatggtgtctccctgaccccatttccactggagcatacaaaagcagagagctaattatatgatagtaattacctggaagttgtatgtttattggttttccattagtggatactattttcgaactcttcgttgttatgctctagcgacaggagtcacactgtctctactccaaatgtcccctccaatctcatgattagcaggctttttacatggggccattgctggcagcatgagacacccccagggtagggaagggaggtttgactcagtccatacaggaggccccagaggtctccacccacattcacgggcacctcacttgaaaagagcctttaataataaagtactcaacatctggtctaaatgaagcatattcctccttgcccttggatactgagaatcgtatccaataggaaggggcctcccctgtcaccagatatatttatgtatccttcattatgtgccttggttaattgtccctttcctttttttttttttttccttgagaaggggtctcattctgtcacccaggctggagtgcagtggtgtgatcttggcttactgtaacctctgcctcccgggttcaagcaattcttttgcctcagcctcccaagtagctgggactacaggcgcgtcccaccatgcctggctaattcttgtatttttagtagagacgaggtttcaccatgttggccaagctggtgtcgaactcctgaccttgtgatccacccaccttggcctcccaaagtgctgagattaccggcttgagcccctgcagcctggcctaattgccccttttctaccagctcttcttacaacagagaaatcctgagcctcgcttgtaattatagtgaggaaatatttctatgagcttttaaaagggaagcctaaactgggtcaaaatgttgaaggtgataggtcagggagcaagggtcaatactagctttactctgatgagttgattgctaggggctttgagtgtcttttgccaaatttgagggccctctcctagaattccactatcagcacctcatcctattgttattattgttacaactgagattgatagacatctgtggaggattttacagtctgcaaagtgccttttacatgaagtacatcacttatcttcactgcaaatgctgagggcaagttagattacttggccctacttactgcactgttaaaatgcatctcttcactcctccagaagggccacagggcacttgtttccagtcatatttatgtttgttgtgggtaaaaagctagcttgggctgggcatggtggctcatgcctgtaatcccagcattttgggaggccaaggcgagaggccaggagtttgagaccagcctgatcccatctctatttaccaaaaaaaaaaaaaaaaaaaagctagcttacagtactagtagctcctgccttgttcataggaggatctcagcacctagcaaaatgcccaacacgtagaatacaggaaatgtttattgagagaaagaatgcatgcatctagcctaggagtttttttcctttttattttttatttcaatagcacttggggtacaagaggtttttggttacatggatgaattgcacagtggtgaaatctgagattttagtagcataggaattcaagtgactattgctcatttataggccctctccctgttcagtacattctcacatccatgcctttgcagattccacgtacttgaaactccctctaaaaatgtccatcagctttggcgtggatgctactaatttagagaccctcccggggctacggacccacagtgatcctttcttttctgaaatccttcagccctcctcacccaaatcatcagtgccactcagccttgacatcagattggaaccaattaattacctgctaaactacctcatgtaagaaacaggtctaaagatgtaaacagccttgcccagtgagtcagtggcaggcagggtcagacccagaatccaggtcttttattagctgcccagtgtacttcccattacatcaagaacaggaaataggtttcaccatgactatcacctttgatcaagctgtggtggccgcccagagtgatagactgagaatgcctgtgagagagcagcccaggatggtgggaaagagtgctgcgatcgcttgatcatgtctgccaggctgtggaaatgaagagtttggtgtggagagtggctcacattgcaaaagttgggacccccatttaatctgacctgaatcctccactgtaaggatgttgttggctgtcccttcactctcccaactccaagagaattgattcagggcaactcccttttgctcacattaaaaagaaataataagcttttttttcttctcagacagagtctcgctctgtcacccaggctggagtgcagtggtgtgatcttggctcagtgcaacctctgccccctgggttcaagcaattctcctgcctcagcctcccaagtaactgggattacaggcacatgccaccatgcctgactaatttttgtatttttagtagagatggggtttcaccatgttggccaggctggtctcgaactcctgacctcaagtgatctgcttgcctcagcctcctaaaatggtgggattacaagcgtaagccaccacacctggccaagaaagcataatctgaaggtcagtcctggggttaggtcagaacttccctcctaccctgcttggagttaaggatatagtgcttgttacttgtcccccaactccagagtcagcttcaaagatttgactgtgtatttgtacaattagaagagtaatctctaggaaacaagcagctcagtaatgaaatgttacaatcccagcagggccaagcaagcctattgtggtgctttctaggcagaaggaggcttaaggaaaggatcaagcacattgctgctaagaatgtgcaataccaactccactgagagagaagcacggttgcaaactaggggacaattagatgttttccttctttgtggatttggaagagtggttgcaaacacagatgcctctaagggcaacacagataatataaataagtgaatcagcctgggtgtagggcagcagggagcagtggggactgtggctgagagtgcctgtcctacctaaaggatttccaattctcaggtatttttaaaaacgtagtactggccagccggacgcggtggctcacacctgtaatcccagcactttgggaggccgagataggcggatcatgaggtcaggagatcgagaccatcccggctaacacggtgaaaccccgtctctactaaaaatacaaaaaaattagccgggccgtggtggcgggcacctgtagtcccagctactcaggaggctgaggcaggagaatggcatgaacccaggaggtggagcttgcagtgagccgagatcacgccactgcactccagcctgggcgacagagcaagactcagtctcaaaaaaaacaaaaacaaaaccaaaaacaaaaaaaaactcataatactggccaaatagaagatgtttgcaggcttcgtttggttttaggactttagactgaaaacattacagatatgtgtgtatccaatctatctaatttatccattacttaatggcaaaaactgaaattacttttgcaccaacctaataaaagttatgcactggtggccgggcgtggtggctcacacctgtaatcccagcactttgggaggccgaggcaagcagatcacttgaggtcaggagttcaagactagtctggccaacatgatgaaaccctgtctctactaaaaatacaaaaattagccaggtgtgctggcacacacctgtaatcgcagctacttgggaggctgaggcaggagaatcacttgaactcgggaggcagcgcttgcagtgagctgtgattgtgtcactacactccagactgggtgacagagcaagactccatctcaaagtaaaataaaataaaataaaagttatgccctggttaatcagaaaaataaagaagcatacctgatcctccggatggtagttctgttttatggaacagtgtgcctctgctgactgtgatcagtcctgctgaccctggatatcatcccagactcaataactcagacttaaagaatggtattgaggagaaggagatgctttggggtaagatcaagccctagactttgaaggtgagatttcctgaaaagtgggagaagatttgcaagccagagtaaaaagatgtgcaagtcagatctgtaaggcagaagcacaaaggaggaagctttctcagagaagcctgaggctggggcacaggattagagactggtagggccccaggtaggactgagttgtgcaacatggcagccctggggagggtttaacttattgatgtgctccgtcaaactatgaaaaattatatagcacgcaagcttaaaatgtttcccactactacacagagattcccctagatatcttatcctcctagtttcgcctcatatgacattgctgtggagataaagaggtcaggcagaggaggagagtggcctctccctcctgtgagaaaaggcacttgctcccaacaggatcaggagtgaggactcagatggtcctcgcaagccatcagggggagcatgtggtgttgaagagaccctgccgttcaaacctccttgctggtagtgacactgagggactggaaccccttaaggggaagcagctgaggtttgggccagctcaggtgaagcaggctggctgccctctgccctaatcctctgaaggagctggaggtaagaaatgctctgactctctcacaggagggctggaagacccagttcagtgggaactgtaaaatgcttgggaaaacagagacccctattaatgcaaaatattattatgaaccctccctccccacatacttttcaacctcatgaggtgttgtctttaaggcccagtctggtttaaattataagatgaataaactcacctgacctgacaagcaaatgttctgctggacccacagagccttggaaagagcagcctttgcttctccgcccgtttaggaggagcaaccctgtgggcctgtgggaaatgcatggactgggtgtctggcaggtctgggtttgaagctcagcttcatgagcagtgggccttggccttgctgcgcctcatttccccccactcacagggctgtcttgaggctgggtggagtagtcctctggaagccctgaaggtttgaccgttctaaagcagtgtttcaggtgaatttatacattgatgggaaggaaagaaagtctgttggatttttagacgatgcttatgctttggatacaatcaagctctttccccaagggccagaccagggacaaatgagctgtatccctagtaagctagctttcttttaatatgaggatgtattatttgccacaaaggacaaatgtgaaactacctcttgatcagtcacagactgtgggcctcttgggagtctgggaggtcacaggtcaaggcctagagaaatggctgtgtcctaggattagggacagtggaactgctttctctcctgaggcctctttggtgtggtcatggggtgctgctgatgtctgcagccctctgggcactctctcaaagctgccctgtagctggaacatctatctgcatccctactcagcgcagaggcagtgaaatggcagcaaacaactcccttctatttcctggtggcttgttctctgggacacggagaagagcatggtgactgccaggtttcaggcctacctagcagggcaatgagagctcctgggcacctgaggattcagaaccacttctttctttctttttaattttttttttttttttttttttttgagacaaagtcttgctctgtcgccaggctagagggcagtggtgcgatcttggctcattgcaacctccgcttcccaggttcaagcaattctcctgcctcagcctcctgagtagttgggattacagacacacacaaccatgcccagctaatttttgtatttttagtagagacggggtttcaccgtgttggccgggattgtctcgatctcttgacctcatgatccgcctgccttggcctcccaaagtgctgggattacaggcatgagccaccgtgcccggcccagaaccacttcttaattgaagagaacatcttccttctctttgtctatgggataaagtcctatacctgtaaccaaggccatacccaagggtcccccaaatagctcaactcaactggctgatgctcatgggtagccatgacccctccagcccattgcccagcctgtcacacgcttcctgcctttacacatgccactccctcacttcctatttctaccagatgaacacctgcctgtttatcagtgtctctgagaaaacatccccctttccccccaagagcaagggcaaggctctgccttcattgcatccttagccctccaagctagctgatctactctcacatcactcccctgaccagcatgtagaagcaatccacacagaagcaggcctggcatgaagtgtggtcctggggcccctgttgggccatcttaactcattggttgcttgatcatgaggtggggcccaaagaagtgacagggctgctgggactgagggaattactcaggcaattgatgctgactctacctttttgtgatcaatctggtctccttggttccaggatttggagctctgtgctccagcaatgcaagctgcctctgaaccatttgtcttgtcctcctgccctaggactttccttctgcctttgactttaattttctgcatggatcctggacatggttcaaacttctggttctagtggcccaactctctatgaagaagaattccctgtctcagccccagaatctcaggttttcacccagcttgctatcctcaagggataaatcagactctttcctctctgcatcccatctttttgttgtataacttattttgggttttgcttgtttgttttttgagacagggtctcgctgtgttgcccatgctggggtacagtagcatgatcacagctcactgtaggttcaattttctgggcttcagtaatccttctgccttagccttcccagtagctgggaccacaggtgtgtgccaccatactcggctaatgtatttttattttttgtagaggcaaggtctcactatgttgtccaggctggtcttgaactcctgggctcaagtgatccacctgccttggcctcccaaagggctgggattataggcatgagtcatcatgcctgacctaacttatcattttgtcttctaactatttgttttcatgactaagcccctccctggactgtgagctatttaagggcagagtggatgtcataacatatttcataaattaatgcatgaatcaatgatgatcagtgtctgtagtattacaatcacttgtaatgctacagatgatattatagccctatgaattacatagaaaatcatttttatcatccatgacttccatttcaagtctcccaagagggaggaaaaagaatctctgcctgtctggccccacgtggagtccaaggaatattatagttcttttccttgtatttttctaacgccactacattttggggggcttatccaccttagtacctactaagttcaaatttggactaagtctttagctcggttgtgcattttgaacttcatcttaaattggtcatggcccattgctactgcttcacatttcctccgtcgtgttttctcttttattgcttctataggttgtgagttaggataataaagtcaagataaaattgctccaagccatttgcagctctgggaagctggcacagggctgccaggagctggctgggtgccaccaagaggaaaaaatattcttccgtgttgccagccttatcaggactcctcacagtttcttgccaaaattttaggaaaacgatgatctactcccctgcagctattctgtatgtttctataggtggggagtctttcaacaaggattttcactaaaaatacctctcatgtttttcccctggtttaagactgtaacttgagctccatattgtgaaatactgacattgagatattaatcactgtgcatagttgaggcatcattgtcatcatcatcagccactcacactaactgaaagtttataagctatggaatcccactcaggacgtgctcatgaaagaataattggagattattttttaactgtgaaaaatgttcttttggaggaatgaggaattgggaaaataggaacagattatagaaagctggtaggaaatcacaattctattcttttattttctttctgtttgtttttccaagataaagggtctccttatggtgcccatgctggccttgaactgggctcaagtgatcctcccacctcagcctgccaaagtgctgggattataggcatgagccactctgcctagcctaaaattttcaatttttttatggaggtgtggtctcactatgttgtccaggctgttcttgaactcctccctcctcggcctcccaaagtgttgggattacaagcatgggccactgtgcccagcccacacaactctactcttttaaatatttgctctacatctgtttgatgccacaacaatgactcaattccgacaattcaatttatttatatgggtgtggcttttttttcttattcgatgggggagtttgtctatctggcatagacagacaagccaaatttcaaattcttgtttaagtgttgagaagatatggccataagcatgtctttactcagtcaatcaattgaacttcaatcaacagtgcctactgagcactaactatgtgcatgcccagtcctgtgtttggaaggatacagagaataaggtaccatttctcccttttctttattaatttatagtctagtcagaatttatagactagtcaggcagtcctgggctcaaatcccaatgctataacttagcagcaaagtggaattttggcaaatgatctaatatctctgcacttctgtctcctcctctgtcaaatggggtgatgataacacctaattcacagggctgctgtaggaatcaagggagattgtgggtgtattctgtggggtgtatctataagtattggctttcttccccttcccttagcctttagcctggggtaacctcagtggagaggattcctagaagccctgtgtaaaagccttcttcttaaggctaagggcaattacctccatggccacgtgaaaatgggcgcatagtggctggctttaagtgaaggctgcaaactggctgcccactggccaaagccagagttagacacttccaattagtcctatatgatgttaaaaaaaaaaaagtaatctgcgggcacagtggctcatgcctgtaataccagcactttgggacgctgagctggggggattacttaaagtcaggagtttgagaccagcctgattaatgtggtgaagcctcgtctccactaaaaacacaaaaattagcagggcatggtggtgcacgcctgtaatcccagttactcggaaggctgaggcaggagaattgtttgaatctgggaggtggaggttgcagtgagccaagatctcgccactgcactccagcctgggtgactcagtgagactccaactcaagaaaaagaaaaagaaatctgttgcgagcatttaaatatcaaaagctattcattaaaaccccaatttggggattctcttgaaaatcggaagattctggcttttgacatttggatggagctgaccacaagctactttctttggatgggtcaagcactctccagagtgcttgtgacttcccacagggagatcagatgtggtaaaaggacaccattagttcagatctagccaaagttcaaagcttaagaaaaagaaccaagccaagaatgatgagccagggcagccctgataggacccaccagaagagtaaaggcttagttcatttaacaaatattattgagcaccttgatgtgcaagtcactgcattgggtgcaagtgggaaagagaaagaacatgtgttgggagcctactatgtgtcaggctctgacatgagctcatctaatccatcaacttcttgaggtaggtattaagattttttttttttttttttgtaaatgagaaagtaggattaagtggctaaatggatcagctgctaagtgctggagtcaggatccctgtactctgagggcctaggtttgtcctctatacctcaagcctgcgagagcaggatggaatgcgtcatatgttcctctgtactgttccatgtgcaaactgggcacatgactgtggattgtgtgaattttctggtgaacgataggacagtttttcctctggctcctgctctcaagaagattctagaagcaaaggagacgatgattgccagacaatgaccaaccaaaggctgtggggctcaaggctctgggaggaggcagcgtgtgaactgggccttaaaagtcaggaagtttttgataggcggaggaggcaggaaaggatatgcaaggcatggggacagccccagcagagacacgaggagtaatctggagtatgtggggcacaaggtggtgcatggatggggcccaaaagtcaggatgcagtcaggtcctggatgaccctggtgcagctaaacaatccagacttcctccatttccttcctggggccattcctcaggcccatccttttctctgtccctcttgtccaccggatccttctgctccctgccatggcttctggagcacaagagagatgagggaactcaagcaaatgtataaatgattgaaggcattgagagctcatggtatctaatagggatctgttttaaagaactaaataatatcattatataaagctgaccatctcatacgaaatgactctgaaatgttacccctggatatatattccagtctagagaaactcatgctcaaaactaattatggcagcatgatttgtaatagccaaaaagtaaaaacaacccgaatgcccaacaataggaaactggataaataaatggagtattgtcatagaatggaatgcttaacagctgtgaagataaatggattccagttacagcagtggttctcaaacaggggtgattttatcctccacccgggggacatttggcagtgtctggagacattttcagttgttacaactggagggatgttactagcacctaatgagtaaaggccagggatgctgttaaacatcctacaatgtactgcacagcccctcataacaaacgattatccagcccaaaatgtcatagcatccaggttaagaaaccttgagttacagtcattaaaatggatgaccctcataatgttgagcacagaaagcaagttgcagaagaatatatatacagtataatactattttttaaaattcaaaagtaagcaaaaaagaaagaatacattgtttaggaattacacatatacagtaaaattatgctgtgatttcagaatccacattgcaactatcctttaagaaagtatcacttaatgagttttagtgtgatatcaaagaggaatatccacaattatttgaaaaagctgttaaaatactcctccttgtccctctacagatctgtgtgaggctggattgtcttcatgtacctcaatcaaaacaatatagggttgcaacagattgaatgcagaagcagataggagaattcagctatcttctgttagccaaacattgaagatatttgcaaaaatctaaaacaatgccactcttctatatttttgtggaaaatatagttattttccataaaatatgttatttatgttcaacatgtgatgagtttgttgtttttagaagaataaataataaatgttctgttttaatttctgatactgtaaatgttgacagatatagcccacgtaaacaaagtttctaggatcctcaataaattttaagagcttaaaaggatcctgagaccaaaattttcagaacagttgccctagtctaagacagatctatttcctttatctcctttcccattttgtacgctggaagagttccatttagtgagcgccatattgagtttgctttccattaataatacctcagttatggctcatttgtaagtaacatgaaacagttatgaaattcacatggcttggtacctcagcctttgactcctgggctctacctccagtaaataactaaaaagattttttccaaatttattttcttcctcctcctttctttgtatttttttgtcattccataaacatcatagaacaccctttaataatagataaaattagttaattttaatcaaatatttaccttaccaagacactgtactttatatgagttatgtcatttaagccctcaaaaaccacatgaggcagatattatttccactattttttttttaagagacataatcttgctctgtcacccaaggctggaatacggtggcgtaatcatagctcgctgcagccttgaactccagggcccaaacaatcctcctgtcccagccttttgagtagctagagctacaggcatgcaccagcatgcccggctaatttttaacattttttggtagaggcaaggtcccgctatattgaccaagctggtctcaaactcctggcctcaagcattgctctcacctcagctttccaaaatgctaggattacaggcatgagccaccacgcccagcatttattctcattttgcaagtgaaaaactgaaagttaaatgagtgaattgacttgctcaaggttgtgcaggtagcagtgatggaatcaagacgtggcccctggcatagtggactgcagacctggcgggtttagcccctatcccgcaatcatgatcatgcttgagagggatgtgaatacgttcataagatatattcactgttgtcaaggagcttatagtctagcagcaaggattaaacaattttgcaaacatttggtaatttaaaattcattttttatcctgtcttcttcaataaaaacaaatttttaatgaaactgatcagtaccaaagggaaaaacacatttttaagagctttagtgatttgtattcactaggagaatactgtctgattctcccaaggatttgagaatattatcaatcattcactaagggttgagcagagcattggaggaaaaaaaaaaaaacacaaaaataggcttagtactccaagagcctatgggtgggaggtggtgaagctcacaaatagctacaatattagggagaatgaggcgaattcaatacaagaggcataccgtctttaccagatggatagaacacatctgaatgcggcaactaggaaaggcttctcagaagaggtggtgtctgaagggtgggctggattggggcagaaagagatggtaggagatgggaaatctaggtgggcagaaggatatgttcaatttcctaagcttggcctctctggaagcagaccatgaggaagagtttattagggatcaacagccatgaaaggaaggagagaaaggaggatgaacaaaggaagaagtaaaattgcaatccaggcttgataaagcctgccaaccaggtggggaaatctgtgggaagtagtgcctggcagagttgttccagatcaggttaaaatggtcaggccctgatatagtttggatatgtgtcccctctaaatttcatgctaaattgtaatccccagtgttggaggtggggcttggtgggaagtgattggatgatgggggtggatttccctggaatggtttagtaccatccatttggtgctgtccgcatggcggtgagtgaggtttctgttgttgttttttctttttggctttttgtttttttgttttttgttttttttttttgagacggagtcttgctctgttgcccaggctggagtgcagtggcacaatctcagctcactgcaagctctgcttcccgggtttacaccattctcctgcctcagcctcccgagtagctacgcccaccaccacgcctggctagttttttgtatttttatctttatttatttattttatttttttaaattttttggtatttttagtagagacagggtttcaccatgttagccaggatggtctcgatctcctgaccttgtgacccgcctgcctcggcctcccaaagtcctgggattacaagtgtgagcccccatgcctggccaacagtgagtgagttcttacaagatctggttgtttaaaagtgtgtgccaccttcctccccaactctctcttgttcctgctctgctgtgtgacatgcctcctcctgttttgtcttctgccatgagaaaaagctctttgaggccttcccagaagctgagaagctgctggcatcatgcttcctgtatagcctgcagaagcatgagctgatgaaacttcttttctttataagttacccagtatcaggtatttctttatagcaacgcaagaatggcctaacacagtatattgatactaaggagtaaggtattgctataaagatacttgaaaatgtagaagcaactttggaactgggtatcaggcagaagttggaagagtttggagggctcagaagaagacaggaagatgaaggaaaatgaggaacttattgggaacaggagcaaaggtcacccttgctatgcctcagcaaagagattggctgcattctattcatggcctagggatctgtggaagtttgagcttcagaatgatgatttagggtacctggtggaagaaatttctaagcaacaaagtgttcaatatgtggcacggctgcttctaacaacctgtactcagattcaggaacaaagaaatgacttaaagttggaatatatatatatatattttaaagggaagcagagcataaaagtttggaaaatttctagcctggccatgtggcaaagtaagaaaaagctcttttaggggaggagttcaagcaggctgtggaactacttgctagagatatttgcctaactaaaagggagtcaagagctaatatccaagaaaatgggggaaaaggcctcaaaggcatttcagagatcttcatggcagcccctcctattacaggcccagagacctaggaaggaagaatgctttcacggactaggcccagggccccactgtcctgcacagccttggaacactgttccccaccttcagctccagccatggctcaaaggggcccaggtacagctcaggctaccactttgaataatgcaagctgtaagccttggtggcttccaagtggtgttaagcctgcagttgaacagagtgtgagagtggtggaggcttggtggcctctgcctagatttcagaggatgtatggaaaagcttgggcatccaggaagcagcctattgcaggagtggagccctcacagagaacctcttctagggcagtgtcaagaggaaatataggattggaggccccacacaaagtccctgctagggcactgactagtggaactgtgggaagagggccacagtcttctagaccccagaatggtagatccacccacagcttgcactctcagcttggaaaagccacaggcactcaactctagcccatgagagcagcctcggggctgaaccctgcaaagccacaggggcagagttgcccaaggccttgggggcttacccctcatatcagtgtgccctgtatgtagtacatagagtcaaaagagatgagtttggagctttaagatttaatgactgcccttctgcgttctggacttgtgtggggcctgtagcccttttcttttgactgatttctcccctttggaatgggaatgtgttgcgggaagtcagggaccccaaatggagggactggctgaagccatggcagaagaacgtggattgtgaagatttcatggacatttattagttccccaaattaatacttttataatttcttatgcctgtctttactgcaatctctaaacataaattgtaaagatttcatggacacttatcacttccccaatcaatacccttctgatttcctatgcctgtctttactttaatctcttaatcctgtcagctgaggaagatgtatgtcaccccaggaccatgtgataattgcattaactgcacaaattgtatagcatgtgtgtttgagcaatatgaaatctgggcaccttgaaaaaagaacacgataacagcaattgttcagggaataagagagataaacttaaactctgaccaccagtgagccgggcggaacagagccatatttcttttctttcaaaagcaaatgggagaaatattgctgaattctttttctcagcaaggaacatccctgagaaagaatgcgcaccttggggtaggcctatgaacggcccccttgggcgtagccatctcttatggtcgagactgcaggggtgaaatagacccgtctcccatagtgctcccaggcttattaggaagaggaaattcctgcctaataaattttggtcagaccggttgctctcaaaaccttgtctcctgatgttatcaatgacaatggtgcccgaaacttcattagcaattttaatttcgcctcggtcctgtggtcctgtgatctcaccctgcctccacttgccttgtgatattctattaccttgtagagtacttgatgtctgtgacccacacctattcgcacactctctccctttttgaaaatccctaataaaaacttgctggtttttgcagcttgtggggcatcacagaacctactgacatgtgatgtctcccctggatgtccagctttaaaatttctctcttttgtactctgtccctttatttctcaagctcgctgacgtttaaggaaaatagaaaagaacctatgtgaatatcggggcagattccccgataggaatgtttacccaatgcctatatccccattgtatcttagaagtaaataacttgttttttttattttactggctcataggtagaagggacttgccttgtctcagatgagactttggactttggacttttgagttaatgctggaatgagttaagactttgggggactgttgggaaggcatgactgtattttacaacgtgaaaacaacatgagatttgaggggccagaggtggagtgatataatttgaatatgtgtccctctaaatttcatatcaaactgtaatccctaaggttgatggtgggcctgatgggaagtggttggatcacgaggccagatttctcttaaatgattaacaccatccccttggtgctgtccttcagacagtgagttctcatgagatctggttgtttaaaagtgtgtggcaccttcttcccgactctgtctcttactcctgctctggcatgtgagggtgcctgttcccacttcaccttccaccctaagtaaaagctccttgaggcctccccagaaatggagcagatgctgacatcattcttcctgtacagcctacagaactgtgaacctattaaatccagccaaaccatatcagttacccagtctcaggtatttcttgatagcaatgcaagtatggcctaacacaggctcttacccccatctcactcagtttaaccatagggcacctataagccgccacagggcatgcccacagttgaggtgactctctgcagctgaggcaaggactctgctttgggaagaataaccctgtggcagcttgtaggagagatttgaggccaaaggtgtgtaggtttatccttgttttttgtttggttggttttttttgtttgtttgtttggtttttttttgtttgtttgtttttgtctagctcctcttctctaagaatggccctacctcttccacatggcaatgatgctcatacaggggtaggggactgacacaactgggcaagtcagagttccttgcatggggatttgtaattgagccaaggagatttcagcccctatcaggtctggtctcttgaatgcagatgtaaaactttatggagtaatggccatgttctctaccatggggtctgagtaacaggagaaagaggtacagactgaaatcactgaggacacagagagatgcaccaaaagagctggagtgactttcttgtccttgactccagcatttttttttgaagtttcataggtcatccctgaaatctttcaataaatctttctggccagtcttttttctttttctttctctcttttaaaaaaatttgtccatttccattactggcttctgtttccaaaaaggtcctgattgagagattagttgggaactatcagactaagaaatgccaggtgccttaacataggggccagcaatgggaatggaaggaggattgatttgagaagtatttagtttagcagcaaattgaatatggagggagcaaaaaagagaaaagaggaagagctttggtgccttgtgaatgtgaggatggcagtcctagaaactgaaagagggaagtccagaagaagagctggtttggaagtggggcggggcatggtgatttcagagtagcttctgctggtgggtgctccacaagtccctggcatcactccagccttcctcctgtctgaatacaatgcttcttcttctttttttttttttttttttgaggtggagtttcactcttgttgcccaggctggagtgcagtggtgcaatcttggctcaccgcaacctctgcctcctgggttcaagcgattctcctgcctcagcctcctgagtagctgggattacaggcatgcgccactgcactgggctaatttttaaatacaatgcttctaaacaacctccctacctccaatagactctatactgaatcccaaacttccataactccattctggtatacccaatcatctagcccaaggaaggatcttataacccttacagtctgagggaattgaagacaattctttccattcatgtatttaatcatttattccataacattcgacaaacatttgtgtgccagatcctgggacacaaagaagatgaaggaaatgtccctggatcacaatctaacaagacagataaaccagctatgatagagtgatacacgaagactggttggaactctcaggagggacatctaactgggaggaatcagggcaggcttcatacagaaagtaaattttaaatcagattttaaagactaggaaagatttatccagttggagaagtaggaaatgacattccagatggaaggaagcatggaggaagcagttcagtgtggctagagctcaggatagatgagaggagggatgaggctggaaaggctctgttgggctaaggaggctggctttgatcttgtatgtggtgggaaaaagcaaatgattttttgatctggactatatcgtgatcagggacactttcattttaaagtaaacttttatttaaatatacagatggaaaactacacaaagcataacctacatcttgatgaattttcgcgaagtcaacgtatccacatacccaagaacccaaatcaagaaacagaacaaggccaacctcccagaagccccttttggtcgctgccccttcccaaggacacacatgtgtttgcaaaaatcttctctagtagcagcacaaaagatgggttggagaggtcagaactaaagacagaaatgttctaggaggcaacagcaatagcccacgtgaaagaggctgaggcctgatcccaggcagtgacggcagaaaaggagaacaaagggctgtgaatgtgatagaatgacaatatcccctcccaggaattcacaatatgcatttactcctccaggcaactgtgatctgaccctgagaatttccagtagcttcccttgtaatttaaaaatgcccaggacttggccgggcgtagtggctcatgcctgtaatcccaggactttgggaagccgaggtgggcagatcacctgaggtcaggagttcgagaccagccgggccaacatggtggaaccccgtctctactaaaaatacaaaaattagctgagcgtggtggtgcatttgtgtaatcccagctacttggggggctgagacaggagaactgcttgaatgcgggaggcagaggttgcagtgagccaagatgcagtcactgcactccagccagggtgaaagagcaagactccgtctcaaaaaaaataaaaataaaaatgcccaagacttgatatatacagccatgcatcactgagccaccaagatacattctgagaaaggtgtcagttagatgacttcgtccttgtgcaaacatcatagacaaacctagatggtatagcctactacgcacctagattagatggtctagcctattgcccctaggccacaaacctgtacagcatgttactgtactgaatattgtaggcaactgtaacacaatgataagtatttgtgtatctaaacatagaaacaggactgtaaaagtgtagttttttaattttaggggaccaccattgtataggtggtccattgttgactgaaacgtcattatgcagcatgtaactatataagtaaggggagctgcatgtcacagtgatgccacttttaaagggagtactttgggcaactttctggcattgtttaaaaacaacaacaaaaacccaactggaccttgtaatgagagactacaaatccttcctggggattgttagcctggaagagtctttttgcaggttggaactgctcactgaggcacactggcagagctatgtggcaccaactcaagtcgtttaacttcacgaacacccacacaatattagagggaaagaaattttaaaagcaaaagaaaaaaaaaatccggttaattgccatacatgtttttgcaatcctgacacagtaataacttgcctgtaaacacctcccttgaagaattggctaataggatgtacagtacatggcaaaggaaattgtttattcaacgaagactttcaaaaggggctgtcgattcttcttatgaatttgtgatgactctgtaagattggagaggataaagggacaattttctgtttgttttttgagatatagtcttgctctattgcccaggctggagtgcagtggtgcgatctcgccttactgcaacttccgcctcccaggttcaagtgattatcccgcctcagcctcctgagtagctgggattacaggcgagtgccaccacacccagctaatttttgtatttttagtagagatggggtttcatcatgttggccagtctggtctcggactcctgacctcaggtgatctgcccacctcagcctcccaaagtgctgggattacaggtgtgagccaccgtgcctggccaaagggacaactttctaagggtgtagagtggaatagatttatgtgaaatagaaatgtcctgtggctttggttgttttatctgtaaaatgaaggcactgggatagacctgtggttttttattttgtcctgtagaagtgggtccctagacctctcttgccactacatcctccctgctttaactagagtgcctctgctcgaacctcaccacagggttgccatgtaagttgttgtttgaaaagagggattgcataactgaaacaagattggaaaaccactggatgagatgacttccaaggtgccctattgctctaaaattgtaggaattcatctcttgtctgacttgtggaaggtgctgaagatacaaagatttaaaaaataactcctacccacaacaaattcatgagtgtaagatatgcatgttgattgggtggggggggtgggggtgtgaaacaacatctatagtatcagtgatagtaacatggcaagacctaaaatgaaggtatgactcaaacatttgggggagaagattttggaaggtttttggagaaggcgacatttaagtggatattaaatgaatagtaggagctccccaggtatagaaagagggaggaggaggtattggagacagagagatcagcataagcaaagtcacggaggctataagatggtgcatggttagggaattaactatattcattatgctcattatgttccctgcatacccatggagcgtagttagaagtggccaagagggatgctgaatgacactgaatagactagaggagcccctcccgaactcttgccttctaggagctctttgggggttgatgctggtttctgcaactatgtgaccaactaacaataagactgtttaatcattgactgcaccacaccctacttctattattttgtaactccactggggtaaataatcaaggaatgtgttgataagatgatgggtggggcctcaaggaaagcctagaataagaggagtcatagctacctgccctggtggccagagccagggccaggactctcctctaggccaagaggactgcttcaggctacaggccaggtgcccttccaccaataagactttgtgtttagctctcaagcccattgtctgggagagggaagacttccagtgatgatgagggagagtcagtttctccaagatagggaagggactgagtatttagaggtagtgggtccatgggtgttggattcctgaacatccattgacacgcaatgccccagactgagggtagctacgtgctgagcctaggaaaactggacctcagacgctgtggaatgaaagtgtgaatgaaagatctttgggccctgcttgagttggagggaatggagctgcctcacaagttggacaaggagcatctcggcagtgaccaacatggacccggaggggcgtttcctaaaccttctggcctttttgtcttcctgggattcctgtacaattctaggaaggaaaaccctcaataatctgctctcctgaaaaaatggatgctcaaaacccatttaatttgatttagaaagagaatgagatgtgatgtttcctgcatctaaatattgtggagcaaatgcttgccactataatggcttttcaatgggtgtcagacacaaccagacctgtattttggaaagatcactctggcagctgaaggaggatgtgctgcggggcagagactgactgtggggagacgagccacaaagccattatggcagtgcaggagaggcggggaaggagcaagggcagtagagacggagattcacagttggttggggacacattttggaggcagaatgcactggtcttggcaaccaattaaaataataaatgctaagagggagcatttatctagtctataacagtggtttgcaacttgacagtgcattagaattgcctgggaatcttttaaacctcccctccccacaaagcccaggccacacctcagatcaattaagtctgcatcactgcctgtggtacccagccacacatttcccttcccacatccccctactctgttgctcaggctggagtgcagcagagcaatcatggctcactgcagcctcaacctcccaaggtcaagcaatcctcccacctcagcctcctgagtagctggggatatatgcatgtgccactacacctggctaatttttttttttttttttggtagagtcatgttctcactatgttgcccaggcttgcatgtatttttgaatgaagccaagattgagaaccactgcactaagaggtcaaacttggtaagcagagtgaattgggatgctattaaatgagatagggaacaaatagttctttgtggttagggtgtaaaataggtagagaagcgggaggaagagcaagttcaggcaggaaataatgaattcagtttgggatgtactgactgcagttaaaggtctgaggtcctggaggggatagccaagagccacagatagggggttggggagaaggggcttggagagggtccggtcatcacttcctctgaagtaaggataggtaaagatttggagcagctgccatagggactgaaatggttctaagttaaggacaatagcataggaatgtatgcatcaagggctagcaatgaggggttaggtgagattgctctatattaactctagtattaaccctgtatttgaatttgaccaacaaacattcatctcaatcagtggtacgctggagccagcatgtaccagtttgcaaaagcagaggatcaaatttacaggaattttgccagacagttatgaaacacagtcattattaaaattgaattacacaaacgtaaatgtattaaaaataaaggtaataaataatcccttatttctcatcccccccttctttctttttttctgactacattctggctttctttgcttcccagacaaggtggcagaaatcaccattcccagatcctgagtttatgagttctgtctattaaccagccacaccgaaactgtaatctctcagtcttgattccagattcccagggaaggagctcattggctcaggttgttctagatacccagctctagacttatcaaagatttttctataaaataaagatatgggagatatggaagccagaccaaaataaaaagcctacatctctaggtccatttttttcttagggcaaaagaatacatcatttgtgcccagaatgcactgggtattgaagagatgacaactgtcttctgccaccagccatccaaaactttataggagacctcttgttcttacttcagcctaagacaaaaaccagatagcgctcgtctctggcagagagatgaacagctccacagagtgtcaggcaaacaatatacattagcctaagtggcaatttataattttaatggcccagctgcttgtcatggtagggtggggtacattttaagttagtactgtttactgcgaataaggctaaatttcccccatcattcattgcaaaatgtccatggcccggaggtctcatcaatgtttagggcagttgctggcttagggcttggctgacttcttagttcattaacttctcattgaccagcttgaggttaaaaaggggagcacaacacaaatctgtggaattgagcaaaagcgagggttaggattaggactggcacactgtttattatttcccttttctctctgtttttttttatttttttaatttttattttttaatagagacagcatctcactatgttgccaaggctggtcttgaactcaggggctcaagcagtcctcctgtcttggcatcccaagatgttgggattatgggagtgaaacacaaaacctgacccattattgcacatcattagactgtgagcaattgaaggcagggctctctagaatctagactccagattatcttggccatcccatagctccaggtatcaggcctcgggatgtggtttggatgtgtgtccctgtcaaatctcatgttgaaatgtaatccctggccgggcacggtggctcatgcctgtaatcccagcactttaggagatggaggcaggctgatcacttgcagtcaggagttcaagaccagcctggccaacatggcgaaacccatctctactgaaatacaaaaattagttgggggttgtgtgcacctgtaatcccagctacttgggaggctgaggcaggagaatcgtttgaacgcaagaggcagaggttgcagtgagccgagattatgccactacactccagcctgggcgatagagcgagactccatctccagaaaaagaaaaagagacataatcccaaatgttggaggtggggcctggtgggaggtgattggatcatggtgggggggggctctaattatttaacaccgtcccccttggttcccgtgagatctggttgtttaaaagtgtgtagcacttcctgcctctctctcttcctcctgctctggccatgtcaagtgctggctcctccttcaccttttgccatgattgtaagctccctgaggcctcccaggagcagatgccaccatgtttcctattcagcctgcagaaccgtgggccaattaaacatcttttctttataaattagccagtctcaggtattttcttatagcaatgtgagaacagactaatacacctcacatagactggtccttgatttttttattttttacttttttaaagtcagggtctcactcagccacccaggctggagagtagtcatgagatcatagaacactgtaactttgaactcctgggtccaaatcgtcctcctgcctcagcctcttgagtagctcggcctacagttgtgtgtcctagccaactacatctggctagttttaaaatttttttgtagaaataggtctcattgtgttgcccaggctgatcttgaactcctgggctcaagtgatcctccttcctcagcctcctgagtagctaggaccacagttgtgtgctaccacacccagataattttttaaatttttggtggatacaggagtctcactatttcccaggctggcctcgaactcctagctgtaacagaccacaggctctttgcctccccaagcaatgaaagttaacacggagcaagcagattttccagacaaggcttttatttcagggcttgtgctcaagcacaagggagacagtgaaagtggaaaggatctgtcagctgactaccagaaaacgctggtggggatttttttattagaccgagagtgggaatcacatcaggggtaaggtatgcaggctgggctgggcagtgcacatgatgggtacggtatgcaggtcaccatatctgatagtgatggttatcttgagtaatgggccacctgatcgtatggccagaggcaacaaggctgtaaatcaattgttcagcattcctgccctaggtgggacttggcgccaccttgatgagatatctgggtcttctgaggccagtttctagaattctttaagtaaaagaaatggttaaacatggaagcacagaagaatggctattttctttgtatgactaaagcctcagggttaggcggtatatcatcagtgagatagtggtgtgggttttgtgatcagtgggacaacagaagaaggaaaaagaaaaaaaggaggctgaggtgggaggattgcttgagcttgggaggctgaggctgcagtgaaccatgatcactccactgcactccagcctgagcaacagagcgagacccaatctcaaaaaaaaaggaagaagaaaaagaaactagctgggcgccatggctcacgcctgtaatcccaacactttgggggccaaggcgggtggatcacaagatcaggagttcgagaccagcctggccaatgtggtgaaaccccatctctactaaaaatacaaaaaaaattagctgggcatggaggcgagcgcctgtagtcccagccactcaagaggctgaggcagaagaatcccttgaacctgggaggcagaggttgcagtgagccgagatcgcgccactgcactccagcctgggtgacagagcaagataccatctcaaaaaagaaaaaaagaaagaaactattagagccatgaatgaatctgactttgatgactcagagagcataagaatatgtgaaggaagaactctgtcccattcctacatgacatcaagggatcctcccccctcggccttgctacatgctgggattacaggcgtgagccaccatgcctggcccttgatattttttcaagaggtaaagacttgttccttataaaatcctatattttattaaacaaataagactttaatgcagttaatttcatccccactctggtcaaggaaatatatattatgtttaccagttactcagcaaatgtttctcaagaactgtcttaggcccagtgaagccagtcaaagaattatcaagcccattgaggagggcttgatcattcagtcatctacttgcaggtggttggtgcaagctatgttatatttaagctgtatttggattaccaattttcaggaaattaagacagaatgaaatatacttggcattgaaactattttgagccaggcatggtagctcatacctgtaatccaagcactttaggaggccatggtgggaagattgcttgagcctaggcgttcaagaccagcctgggcaacatgacaagatcctgtctctacaaaaaaaatgtttttctaattagccgggagtggtggtttgtgcctgtagtcctggttactcaggaggctgaggtgggaggattgctgagcctgggaagtcgaggctacagtgaactacaatcactccactgcactccaggctgagcaacagagtgagaagtccctgtcgaaagaaagagaaagaaagaaagaaaggagggagggagggaaggaaggaaaggaaggaaggaaggggagagaaagaaagagagaaagaaagagaaagagaaagaaaaggaaagaaaagaaagaaaaggaaagaaaaaactactagggccataaatgaatctgtctttgatgactcagagggcatattttttcctttcttcatttaacaaatattaaaatactgaatgtcccttatgtgtgaggtcctgttctagagcttagaaatataaccataaacaagacacagcccccaccttcaatgaggtctctagtgtagttgggggaagcccgtagcgggagagaagtgggctgatgggctggtgagtggggatttcagtgctcaaggagcagtgcatgtcaggattgcctagagaaggggtgtgttactcagatgtttgggtggggcatggcccaagaaggccctccagaggaggtgacatcttcttttgagaccagaagatcagtaggagtttgcaaagggaaagtagggaggggagggtgggacaacatgttccaggtaagggaacagactgtgcacaggctgggaccagagagcttagcctccaggaacgaaccacactcaaaggtccaacagggcctcagggctgtggttgaagtgctagttgttactgttcttcctgactgtattgctaaactgggacatttgtacattacagtttatttcttctccatcatctgcccaccatgagctctatgaggtgggtaggtgttgcacctccatttcacagacaaggaacctgaggcttggcattgctgtaaggttctgtgagtatggggaagtcttggggagttggaggttttgcctgcctaccctggcctctgtcactccacagctgccttagatgaaagatcacttgaaagggtatctgatctaccttcatacctctgggcaaaaaagtgtcatttgctcctctgggagctgatggaggtacgaaggcatagaatttctgcaatcctgcagcgtaattaaacacatggatgctaacacaggcagacctggcctagctctgccacttgttagtagccgtgtgccttgggcaaattacttaactgaggctcagcgatgcctccatccagctgagacttgatctgagttcttcccctcttcagcagcaggggtggtgcaacacagctccagggtctcacctagtgccaatatcactgttggggagagggatagtggggagtggcaacgtgctcctcatcagacatgtggtaccactgagacaaccgtcggccctgcccacatggtccctttgggcccagtaatgctgttatcttcatgtcatgtttgggattcaggcactgtttgtgagtctgcttgtagtcacaagccagcaccgattccttcctggggacgtgccacctctcaggaagcagaaccatgctccctgctgatcagagaccctcaggcctctctcttcttcttccccaccaagatgctctatttttgtccctaaacaccaccaatacctgcaaaccagcttcttcccttcattccttagcaaactccctaattttccctcaggcttcttgggtttcccgcaaacaaaagccagaaagctttgcctccttctgccttctgctctgcctgagagctttttcaaggtttcatagttcagagataactctctgtttaaatgagaggaatggggaggagcaaatgagggagggaggcaacctattaaaatctcagtatataaaatctagctgcataggcaagaggcaactgaggttcccaaattcgggaagcaaggggtacatagaaggggatagatccaagggatgggcagaagagagaatcattgacacttatagaccagttcaatgtgggagtctcaccatgcatgcctgaattagcactctgacccaggtcaatcaaacaaagcaatcaggaattgtcattttaagttgaccttcagttacctgcaagtaaatgagttgatttaccatctgttgactcctctcagtcaactgaacacagtagaaataaacacgtatgttttaggttgattgggctggatgaagggtataaggggcttcatatgattttgtgtgtaaatgtttaaatttttgcatattaaaaatgtttaagtaaatccatttaaaagccaacttttatgatccatcaacttttacattataaaaagaaatagttggctgggcgcggtggctcacgcctgtaatcccagcactttgggaggccgaggtgggcggatcacgaggtcaggagatcgagaccatcctggctaacacagggaaaccctgtctctactaaaaatgcaaaaacaaaattagccaggcgtggtggcgggcacctgtagtcccagctacttgggaggctgaggcaggagaatggcatgaacctgggaggcgtagcttgcagtgagccaagttagcgcggctgcactccagcctgggggcaacagagcgagactctgtctcaaaaaaaaaaaaagaagtagttgagctaatatttcagactcaatgtgaacacttcatgctactactgagatgttctctataaccgttagttcagatctaatgaatgtttgaaacttgagaagatttcttgctaaagaataaaagaaacatgcagcgcaagagagcaagaaatgaggggaaaaccctaaggccataggagccatgtctgtattttctctttttttctttctttttttatttttttgagacagagttttactcttgttgcccaggctggagtgcaatgttgtgatctccgctcactgcaacctccacctcctgagttcaagcaattctcctgcctcagcctcccgagtagctgggattacagtcatgcgccaccacacttggctaattttgtatttttagtagagatggggtttctccatgttgatcaagctggtctcgaacttctgacctcaggtgatccacccacctcagcctcccaaagtgctgggattacaagtgtgagccaccgcgctcggcccatgtctgtattttcttagaggagaaactaaagccagaaaggaaaaggagagtatcacaacatgagtgaatttggccttaccctcagcatcctggattaacagggagagcaagggggctggagcctgcgggtacagagcaagagaagatgaccccacctcaaactacgccccagggcagccagcagaagtcaagacacagtgtccaaagaacttgttgtacttggagtcagacaggaggaagcacctttgttctaggtcaatttattcggaacaacgctgcagccagaagttggctgtttagagaacgttggccagttcctcaaagggagaggctgacaaatgtaggcagagtgtccctgtcactggtccaagggtcaagggaagtggagggacaagacagacacaaggcagatgcccagctctggtgcctggctgagtgtggtcctgaggctctttccagttggcaggaaggaaaaacaacttctcgttacttcagctgatgttcaggatacgttgagaaagtgacttgaccccgtctactttttttttctcatttttaatctgtggctcctgacctcggaatgacttctgtgagactgtagtgtctggtacctcatggcttttgctcaccgtcttctcagatggtctccaggcttcagcttccctgtctgctacacactgtcttaggatgaggcgcctctgaggcacctatttgtatgctggaagtttgctggggagaactctcaggatcaatgcctgtaaggagagagggatgagggcctcagccaaccttggggggaattctggagttgggatggcttttcagagttgcctccaatgaaggtaacgtaatcacctgatgggttcttttttttttttttttttgagacggagtcttactctgttgcccaggctggagtgcagtggtgcaatctcgcctcactgcaagctccacctcccaggttcatgccattctcctgcctcagcctcccatgtagctgggactacaggtgcccgccaccatgcccggctaatttttttgtatttttaatagagatggggtttcaccgtgttagccaggacggtctcaatctcctgacctcgtgatctgcccgcctcagcctcccaaagtgctgggattacaggcatgagccaccgcgcccggccccacctgatgggttctacctgcccgctgcacaaataaaaccaattcactgagaccatagtattgcagtaaagaaagagtttaattaatgcaagactggccaagtggaagatggagttattactcaaatcagtctccctgaagacttggaggttagggtttttcacagatggttgggtgtgccggggcccagggaatgagtgctgctgatttgttgaggatgcgatcacaggagtgtggaaaacgtccttgtgtgctgagtccacctctgggtgggggccgcaggaccggttgagtcatgagtcatgagttcaggtagggtcagtcacttaccagaatgcaaaagtctgaaaaacatctcaaaagaccaatcttaggttctataacagtgatgttatctataggagcagttggggaagtcacaaatcttgtgacctctggccacatgactcctaagcagtaaaggatgatcaaaactatgcctacacttcagcagatttcaggcccttctcatagtcctaatcttacggcctttcatgagtcttacaaaggctgtttcagcctccaaatgaggaggggacccgttttagggaggcagtgttatcatctttgcttcaaagttaaaccataaattaaattcctcctgtggttagcttagcctatgcccaggaatgagcaaggacagccagactgtgaggctagaagcaagatggagtcagccatgctagatttctcttgttttcataatctttgcaaagtctgtgacaatgatagcaaggagccagggctttgtcctcccgctaggcattggatactatctgcttcttggaaaggggtgtaacttggctgagggcaatcttcagagacagagacttagctatgggtagtcaatagccaataatgccaacagctgggcaaatagcacctgcatcctgaaagggatatggtggcacaactcagcatcccttacatcttctgtctgactcttttctaaagagtgactcttgtgggtcccactggtcactctgcaatagaggaggtgtccatttgtgagtgtttatcacgtccgttcaccctacaggcttccctcatttccatcctataaagatggccaccactggccaggcatggtggctcacgcttataatcccagcactttgggaggctgaggcaggcggatcatctaaggtcaggagtttgagaccagcctggtcattatggtgaaaccccatttctattaaaaatacaaaaattagccaggtgtcgtggtgggcgcctgtaatcccagctactctgagaggctgaggcagtgagcccaggaggcgaaggttgcaatgagccaagatcgcgtcactgcactccagcctggatgacagagtatgactccgtctcaaaaaaaaaagaaaaaaccgaacaaacaaaaaacatggccatcattgacttgggcttgatcctctgtctaatcagttgggggataggttgcagaacctacaccactcagagcaagacaactttttcagaagggcctgtaaaaagaatgctgtcacatgatagctgtaacaaaggtgttggggaaatgtatgtctggtacccagaggcctcagcaagattgcagaagctcacttaatttcaaacccaactgcttgaaggatctgtggctgttaatactctctctaccagtgtcaatattggcctggagcctgtgtggagttgaggctgcccatggctggctggctggtctctagctgagagggcctaaggaggagataggtgctgacagagacaacatggtctttggcacataaaatcttcattcttcgggagatagagctatcgtaggagtgaggagaacctaggcaacattgaactcagggttaagagacttgaatttgagttctgactctggaacttgctaattacaaggaagtcactggcccaaggttagtcagtcagcaaatgtttagtgagcatctgtggccaggaactgtgtttagcactggagagtccctctctggcctcattgttcttctttgtaaaacaaaagtgtggaggctgagtgcaatggctcatgtctgtaatcccagcactttgggaggccgaggcgggcagatcacttgaggccagaagtttgagaccagcctgggaaacatggtgaaacctggtctctataaaaaaaaaacaaaaattagctgggtctggtggtgcaccctgtgatcccagctaattggaaggatgagatgggaggatcacttgagcctgggaggtggaggttgctgtgagccaagatcacaccactgcactctagcctaggcaacagagtgagaccctgtcgtatacacacacacacacacaaatgggtttgggagattatctcaatgaattaaagtgatggcaatactttcagaaacgaaaatccaaggtgcgtactctgccactaccagaatatttgatattgaggatacccccaggaagctcaggatgtaggatctcattatatacctacagagactctatttcccaatcccccacagttgtttcccccagacatattacatagagtgacttaatccttagaaccatggtgagaagggagaggtagatgttatataagttatatagtctcctatcttgctaattttttttttttttgaggtggagtctcgctctgtcgctcaggctggagtgcagtgacacgatcttggctcactgcaacctccacctcctacgttcaagcgattttcctgtctcagcctcctgagtagctgggactacaggtgcacacccccacacctggctaatttttgtactttcagtagaggtggggtttcccgtattggtcaggctggtcttgaaatcctgacctcaggtgatccacctgcctcagcctcccaaagtgctgggattacaggccagagccaccacacccagccttttgctagtctttaaaatcctctaagtgtttgccttgattttttgaattctttagaatttaaatggtctgagtttaaatagtcctgaacacatttctcaaacactgttatgtaaacaaagcccagccatggtgattacacagtcaggttttttccaacccctggagacttgtatcataatcttatcttagggtcaagcatcggtactgctgaagtggtttgcatttgaacagtctttcagaagttggtgccagattcagagttctctggatagcagatctggtaaggtaggtgtattagtctgttttcatgctgctgataaagacatatccgagactgggtaatttataaagaaaaagaggtttaatggattcacagttccacgtggctgtggaggcctcacaatcatggtggaaggcgaaaggcatgtcttacctgatggcaggcaagagagaatggaagctatacaaaagggaaaaccccttataaaaccatcagatctcatgagacttattcactaccacgagaacagtatgggggaaaacatccccatgattcaattatctcccactgggcccctcccacatcacatgggatttatgggagctacaattcaagatgagatttgggtgggggcacaaatcctaaccatatcagtggggtcactaaggtatataggtatatagtgtagtaagatggtgtcacctgaatcacatttacactctgccccggcacagaaccctgggagctgaatattgaggagcagagaggaacagggatcagaggcacaaaatttggcttgctcttgtagatagcaatagagatgggcacaaggcagagtgaaatctcatcagagtagtgagtgcttagcacatataaggcactgtccttagtgccgtaagagataacaagagaaggtaagatagattaaaatgtattgtgtttgttttatgttactcactttatacatactagcagtcaatcaataataataacaatgataagtgctttgaagtacctactatgggccaggcaatgtgcttaatacttcatatcttcttttcttttatttcatgcactcattcaacacatttgtcttaagatctactaggtagtaagtgctgggagacactgatgaataaaaatctctgccctggaggacttttcattctgggaaagataggcccatagatgtagtaaacaagtgattaagtggagtgttagaagatgacaattactgtgaaaagaatagatctgggttaggtggatcaggagtgcctacatcgggggagcacagaaacggtttacaatattaaatagatggtccaggtgaagcaggacagttccctgaccccttcgtgggtgggaactggagtgcactggcactggcaggggcgaactccactcactctctgctccaccccacgtgggagtgggagcacaggtgagcaggtgcaggagccagggtgtgtgcttttaggtgccggcaagagcgaactccgtactggcccatggcagcatctaagggagggtgccggaagtccctgaagccacagaggaagtgttacagtgccctttacctttgctgtctgtagacagcttaacagctcagcagagggtcagtgtgacagccttttgtgcccacacttgaggcacacgagtttttgtctggagtccaggaggaataaggtctcacaaacgaattgaaggtggtaaatgtgggggatttcattgccaatgaaagtggctctcagtgagaaagggagctggaaaggggacggaacaagaaggtaatcttcacctgagattctccagccatccctgccagactcctctcttcagaggatgataaaaactatatgcctacatttaggatgagtctctctctccgacatccaaccatactctccaacatccagctccttctcgtctctctcccaggtaagcctggggtttttatgcacacaggatgcgggttagggcaggcgccatagtggttttggaaaaggcaacatttgagtgggaaaacagggatgtaagttcttgctttggaccactgttccaggctcaagggtggggtcctcgctggggacctgccctcccagaatttttctgcctcctgtccctatcacacatagtgctctgtgggaaggtgacgtttgagccaacattcaatggaaggtgatgaaggagttagctatgcagatacatggagaagagcgttccagggtaaaggagcagccaggggaaaggcctgaggccaagtgtaactggtatatggacagcagggaggccagagtgactaacgaggagatggcaagatgatgaagtgcttttgtcttttactctgagagagatgggaagccatcagaatgcttattgtttgtcctgctttgttaatctgtgtttcagagcagtgcttggcaaactttttctgcaaagggctagatagtaaatatttcaggctttgcttgccatgtggtctctgttgcaactatgtagtcctgccattgtaacacaagagtagccatcgacagtgcgtaaacaaagaagcatagctgtgttccaacaaaatttacttatggacactgtttgaatttcacataattttcatgggtcacaaaatattgttcctcttttgtttcttttttttaaccatctgaaagtgtgggaatcattctgagctcatgggctgtagttatcctgtgagccatagtttgtggacttccattttaaaggatagtcatgatccgactaagtttcaaccagagcaccctggctattgccttgagaagagtctggaggctgaaagcaggaaggccaggcagaagccgttgctgtaagccaagtgagagatgataatgattgctctgaccagaaagaccacaggattacattctgattgtatctccacccaacctttgaaataggtgtcgtaatgatccttcacaaacaggggaggaaattcaggctcagagacgtaaagtgactcgcgtaagaacacagagcacacaaatggtgaagtctggatatgaagcccaatccaaacttgaaggcttgttctcttttttatttttttctttttttttctaatttttttttttgagatgaagtctagctctgtcacccaggctggggtgcagtggagcgatcttggctcactgcagccttcacctcccacattcaagcgattctcctgcctcagcctccagagtggctgggattacaggcatgcaccaccactcctggctaatttttgtatttctagtagatacagggtttcaccatgttggccaggctgatctcaaactcctgacctcgggtgaaccacccacctcagccttccaaaatgttgggattacaggtgtgagccaccacgcccagctgaagccttgttcttcagtgttataactctgcagtcatgtcacatgggcctttttatcccaaattacagatgagaacactggggctccaagaagtcaaggaacttgcccaagatcaacaaggtcttgatgactccaaagcaactatccctattactaatctaggctaattctcaatttaaaatgggattactgcccactaggtgcttctattctaggtagcaggattctttatacaatcagtgcctctgaggtgtcaataaagagcctagggcattcaggctgggcgtggtggctcatgcctgtaatcccagcactttgggagggcgacggaggtggaccacctgaggtcaggagttcgagaccagcttggccaacatggtgatatgccatctctactaaaaatacaaaaattagctgggcatggtggcatactcctgtaatcccagctactcgtgaggttgaggcaggataatcgcttgaacgcgagaggaggaggttgcagtaagctgagatcacaccactgcactccagcctgggcaataagagtgaaactccatcaaggaaaaaaaaaaaaaaaaaaaagcttagggctttcagagaaggtggggtgacattcatctggagggacaaggagagattgtttgccatgggccttaaagaataactagctgcctctagctatttttgctgacaggctgattcttactgacataggattgcttggttcttctctcagatattttgttctattttgtctttggttttttttttttaagaaaatatttttatacatagataaagctatagattttttattagatatttaatattttaattataaagctaatatatttgtgacaagccaaacaatatagagatatatacaaaaaatttaacaatctcctcattactgtcctccagtttcaccagtctgtgataattaaggtgaatcaggaaaacagaaaatacatcgatatgttaacagagatcattttatctaggatggggtggaatattaaggacagctgccaaattctacccattgcgtatttttgtaactaaagctttaccagaatactgcatgctcattcatttctatcttgtctatggctccttatacgttacaacagcaaagttgagtggttgtgacagacactttatggcccacgaagcctaaaatatttactgtctggtcctttacagaaaaagtttcccaagtcctgatcaaggggattggtggggtagggagaataataatctcccaaagatgtccatgtcctaattcctggaacctgtgaatgtgttaccttacatagctaaagggactttgcagatgtgattaagataaagatcttgagatgagagattatcctggattacccaggcaggaccaatgtagtcacccattgtagtctgtagtcacactctgtagtcctcagaggtgacaaagagaggcatgagaatcagagggagatttgaaggtgctatgctgccgtctttaaaggtggaggaagaggccacaaaccaacgaatgcaggcaatatttagaagccggaaaagacaaggaaaaagattctcctctaaagcctccagaaggaatgaagctctgctgacaccttgattttaatctcagtaaagcccgttttggatttatgacttcagaactggaagataatatgtttgtgttgttttaagccactaaatttgtggcaatctgttatagcagtgacagtaaatttatacagttagcttaccgttattgaaagattgagatgtcgaaaggggacactgaggtaagggaggagctacaggaggtggcttccacccctagggctgggagaaaagggaattagccaggctcatttgaacccagaaacgtggaggacagaccctgtggaactgggacccagacctctgaggagtgggcactggcatactggtgctctgaggagcaccctgaagctgattctgggaatatggagaatactggaaactgcaaccagctgctgctgccggggtgaaaaattactggagctactctgacaggaacaggaagcctttaggaagcaaacaggagatccctcctccaacttccctctctgcctccagtacccgctatgaacagagtgtaacaacagctgacaaagcagaaatgaggtttgtggagtctcagccccagcatcacaaagcagaatgccaagatttggagctgagactagtaacaagtatacaatgttaactatgtgtctgcatcattatgctttttactctatgctgacacaaatttacatttattctaggctttcccttctctttcctatttagtaaaaatgtggtcatatacactttactctgaaacttatttgtgttattaaacaatatatcatgcatacctttccatgaaagcatattagagcagtctcattttaaaaaaattacccagtaatatcccatccagacatcagaaaattgatccattcatttccagtgacaaagatcctttgcttgaccaaacttttagtcaggctcctgaacctcctcctaagcccatccatgcacttccttgtacaatccagtttcagcaaagaaccctgctaagtcaatttagcaagaaccccctaccctatccagtcaacctcagtatctgatctggtttcgtttcttatcctctgaagtctgatcaccctggcctgtcttcagatagaatcatgttaggttggtttctctagaatccttctactcctaatgccacttcttagtaattttctccccacctgcttccacctgctccttggctataaattcttcttgtccatgctgtattcagagttgagccccatctctcttccccactgcaaaaccctgttgcagtggtccctatacctatcatgatagtcctgaataaagccttctttaggccggacggggtggctcatgcctgtaatctcagcactttgggaggccaaggcaggtggctcacttgaggtcaggagttcaagaccagcctggccaacatagtgaaatcccatctctactgaaaatataaaaattatccgattatggtggcacatgcctgtaatcccaggtactccagaggctgaggcaagagaagtgtttgaacccagggggcgggagttacagtgaaccgagatcgtgccactgcactccagcctgggagacagagcaagactctgtctcaaaataaagaaagaaagaaagttttctttactatgttttaacaaatgttacaaataattttttttttctttaacatcagacccagtgattggttcagggcttggcatgtgacttaattcagtctgggcaccccctagagctgagagtgtggtcaaacctacacaaatcacatgcctaagaatgtgagaagggcgttcccctatgggaaacctaggtgcttttggcaggagaaggaaaaacaatggtagagaagcaagcaaccaatgtccaccacaacttcctcatattctctgcccattgtttctactgggttattaaatatttgttgtcagtttattgatggcctttatatatagtcagtgttaaccctttgcatgtatatgtgttacaaatgttttgcccagcatataatttcttttaagtgtgttttactatacaaaaattaaaatttgtatgtaatctgatgtaagtttttttactttatggtttgtacattttttccctgcctaatagtttactctacaaaacaaaaataatgtcttactctacaaagattaaacatattagtcactagattgatcagaataggtgaggggtggcagaacactctactggccatagtcactgagggacccaggttgatggggactccacttcaagatgtgtttctatggtcacccagacagagggaagaggagaaaaaggaaatgatgagtgagcactggctcttaaagcttctgccccaaagtgacacacataatttcctttcacattttattgaccaaattcagccacatggtcaggattaatttcaaatggaataaggaagcacaatttcaccatgtgcttaggagagaacaaatacacacataaggactactgtaatccacacttctagtcaccaaacatctttcccacactcaaaataccttcacccgccccttcctaagggagtcaaccccaaggtcccattctggttggacctttattctgagaacacctcagcctgttcagagattttgaccatgaatgtgatggcaatagccttgattagatccttgctgtgaagctgagtctttattgttttatcttttagctaatctgtattgagaagaaacctgcctcccaaccctgccagtctctgaatttctggtctatcttttcctttcactcctacttgcaaactagctagccctcccctgaacccctatttattgtcaaatatattggctatctacaccattatgttttctagttgcttcttctagagctacaagtttgctaggcacatcaactaccttccaagtgactacccaacagctttaccaaatgtgtcaccattgtgtaacatggctcaccatccttgtcagtaccacctgaccactaagccaatgccacttttttaggtttttgtgctggcagcatcccatattagagatcggtcaagataaggtagattatgctataataacaaactccaaagtctcaatgactaaaaaatatgtcagttcatttcttgcctatattacatgtccagtgtgcatcagcaagggcatctgcttgttgtagtcactcaggaaccttggtgatgaaagctgtacttcaacatatgcttccacagttatcacagcaggaagaggacggacatggcacaaatccatagctctgcctagaagtgtcacatcttccccctgctaacgctttcttatttaaagcaaaaccaatgggtatgtctaacttcaaaagtggggaaagtgtcatcttatcatattcacagaaaagagaacctgggtatttgagaacaaactcagtgactatcacaggcatttttgttttgaggatatattgcagtgaaatagaatgaaggtaacaacaacagtaacaaccttggattatccatatcccaggatctatttttaactccaagcaggcttctgctaccctgattttatggccctgagggtagaccaccatattttgaccccattaattgaaatttaatgttgctttaaaactgaacaaaaaaatctaatccttgagattgcattccttccactaagccacactcacaataagatataattggaatatttccttattctctcctccttcgttacctaatgtttcttatttcttttctttctttcttctttcctttcttttctttctttccttctttctctcttttctttcctcttttctctctctttctttctctttctttttctccccttccttccttcctctctctcttcctccctttctccctttccttcctccctccctctctctttctccctttctgtctctctctttctctctttctttctctctctctttctctctctctctcctttctttctttctttccttctttctttcctttctttctttctttctttctttccttctttctttctttcttttttttgagacagggtctctgtcactcaagctggagggcaatggcaccatctcagctcactgtagccttgccttcccaggctcaagcagatcctcctacctcagcctcccaaggagctgggactacaagtgtcagacactgtgttcagctatcatgttttaatttttttgtagagactggatctccctatgttgcccaggctggctgggctgaaccgatcctccctcctctgtctcccaaagtgctgggaaaaannnnnnnnnnnnnnnnnnnnnnnnnatgcctgtaatcccaggcatatttcattctactattctactgaagactgaaaactacagttaataatgtggagttttttaatttttaaaagttactcatttgtgggattttttttttttgagacagggtctcattttattgcccagactagagtgcagcagcatgattatggctcacggcagcctcagcctcctgggctcaagtgatcctcccacctcagtttcccaagtagctaggactacagctgtgcaccattacacttggatttttttttttttttgacacagagtctcactatgttgcccaggcttgctttgaactcctgacctcaagtgatcctcctgtctcagcctccgaaagcattgggattattatccaggcattagccattgtgcctggatatgaatattcttaaagttataataccaagaatgttagtgagaaagaaaattgaactgctttttaatgactaaaaagttaagctttcattctgaaaatagatcctatcttcaatctagcctcactaaatggtggtttcttaatcattggtttaaaatgccctgactaggcaatctgcctagttaaacattaaagtgaagatagtgagaggcttcaagatggctgactagaggcatcttgtactcgcctcctcccctaagaagaaccaaaatagtgagtagataattacacttcgaatagatcatccaagagagaacactgaaattttacagaaacgtgacacgcaacgcttaaacaaggaaggaaagagaagcaagacagagcgcaaggaaaggtggcttagagacccccagcagaccaaatttccactgtgtacttctgcaatcctagcctcgggagagccccagagccttgagggcccagaaactaacacagggaagtgcctggagaagacgtgatggtattgatccagggagggagattgcgctgggtcacacactcctcctgagtcctaggcagctacaggaaggtgccattttgagatcccagccacaacagactgtgcactgtcctggggccccgtggtaccaggtccgaggcacaagcaaggagcaggctgttgctgccggggctgaggcacaagtgaggtatgggctgctgccaccggggctgaggaacaagcaaggcatgcattctccatttgccagcctaggttgccaccactaaaagcaaccatgccctccccagtggcagggccaacgtgtggccactgccactcctaacccaagcattccaccagaggcctggaagttgccccatctctgcctatcatgacagacacctgcacacaccactggggaaccctgaggacaaactcacatggcaccagcttcacctcacccttgccagagcatgcagttcagggcactgaagattacccagtccactaccattgacacctgaccactcctcccaggggcctacccaccctgccactaccacaacagcttgcaattacctgtgcatgtcacctgcaggcctggggactagctcacacagcccatcacagctaccaccaacaccagtgtacactgtttatttttgaataaaatacaaaatacatttgaaagcttcaacaatagggtagatcaaggagaagaaagaatctcagaacttgaagaatggtcttttgaaataaaccagttagacaaaaataaaaaagaatgagcaaaccctaacttgacacataaaacaccataaagcaaccaaatattcaaacttttggagtcctagaaggcaaagagaaaagagttagaaaacctatttaatgaaataacagataaaaatttcccaagtctggcgagagatttagacatccagatacaagaggcttagagatccccaaatagatataatgcaaagttcttctccatgacatattatagtcaaactgtcaaaaacagagagagaattctaaaaacagcaagagaaaaacatctggttccctataaagggacccatatcagactaatagtggacttctcagcagaaactttacaggccaggagagtatagtatatgcaaagtgctgaaagaaaaaactgccaattaaggatgctatacccagcaagattatcctttataaatgaaggagaaataaagtctttcccagacaagcaaaaactgaggaaattcatcaccacccagaatcaaagccaacacatcctatgcaaccaaaccatagacacatattcaggataaagtcctcctctcccctctgctccctacaagaaatgcttaagggagtcctacagatggaagtgaaataacaaagaaatcagtaaaacaattcaagatatgaataaggaatttgccagagaaagaatgttatttaccattatgaaacatgtaagaatgtaagaacaactggtagagcaaatgcacaaacaaggaagagaaaagactcaaatgttatcactacagaagccaccaaaccacagtgttaaacaataataaagaaaaaaaacgactaaaggacttacaaaacacccaggaataatttactaaaatgataagaaaaagccatcacatatcaataataactttgcacgtaaatgaattaaactttccacttaaaagatgtagactggctgaatggattttttaaaagacccaattatttactgcctataagaaacagatatcatgtggaaagacacatatagactgaaagtaaaaagatggaaaaagatattccaagcaaacaaatcaaaagtgagcaggagtagctacacttagataacatgaacttgaagtaaaaaacaataaaaagagacaagatatattagtcagcattctctagagggacagaactaataggatatataaaggggagttccttaagtattaactcacaagggccatcaataggacccacaataggccatctgcaagctgaggagcaaggagagacagcatgagtcccaaaactgaaggacttggagtctgatgttcaagggcaggaagcatccagcatgggagaaagacgtaggctgggaggctaggccagtctatttacatttttttttctgcctgccttgtattctagctgtgctggcagctgattagatggtgcccagattaagggtgggtctgactcagtcccacccagtccactgactcaaatgttaatctcctttggcgacaccctcacagacacatccaggataaatactttccatccttcaattcaatcaagtttatactcagtattaaccatcacagaaggtcattgtataatgataaagggatcaatttagcaagaggatataacagttctaaatacatatgcacccaacactggagcacccagatatataaagcaaattttattagatttaaagggagagacagattccaataaaataatagttgggggcttcaacagcccactctcagcattaaacagatcatctagacagaaaattcacacagaaacactggatataaactccgcattagaccaaatgggtctgacagacatttatagaacatttcatccaacagctacagaacatacattattctcattggcacacacaacattctccaggatagaccatatattgggacacaaaatgtgtctcaacaagcttttgaaaattgatatgtcacaattttatcaaaccaccaaaaaccaagtcaataacaagaggaactgtggaaactgtacaaatacatgaaaattaaacaacatgctcctgaatgaccttgggtcaaggaagaaattaaggaagaaatgaaaaaaattcttgaaacaaatgaaaatcaaaacataacattccaaaatctacgggatacaacaaaagcagtgctgagaaggaagtttatagaaataagtgcctacatcaaaaaagtagaaagatttaaagtaaataatctaataatgcacttcaaggaacttaaaaagcaagatcaaaccaaaaccaaaattagtagaaggaaagaaataataaacatcaaggcagaactaaatgaaattgacactaaaaaaacaatacaaaggattagccaggtgcagtggctcacacctgtaatcccagcactttgggaggtcaaggcaagcagatcacaaggtcagaagattgagaccatcctggctaacatggtgaaaacccgtctctactaaaaatacaaaatattagctgggcgtggtggcatgcatctgtaatcccagctactcaggaggctgaggcaggagaatcacttgaacctgggaaggggaggttgcagtgagctgagactacgccactaccctccagcctgggcgacagagtgagactccatctcaaaataaataaataaataaataataaacaatacagaggatcaacaaaatgaagagttggctttttgaaaagaaccaaaattgataaaccacttgctagactaagcaaaaaaaaaagatccaaataaaatcagaaacgaaaaaggagacattataacagatactcagaaatacacaagatcatcagatactatcatgagcaactatatacagtaaactggaaaatctagagaaaatggaaagattcaatatatataacctaccaagattgaaccaggaagagagaaaacctaaacagtccagtaacaagtaatgagatcaaagaagtaataaaagtctcccaacaaagaaaagtccaggactagatggcttcactactgaattctaccaaactttcaaagaagagctaacaccaattgccaacaaacttttccaaaaaattgaagaggaggagattctccctaactcattctatgaggccagcattacccagatgccaaaaccagacaaggatgcaacaaaaaagaaaactacagaccaatatacctgatgaacatagacacaaaaatcctcaaaaatactagcaaatcaaatccaacagcataccacaaagataatacaccatgatcaagtgggattcatcccagggatgcaaggatggtttgacatacgcaaatcagtaaacagcatccatcacattaacagaatgaaggaccaaaaccatatgatctctcaactcatgcagaaaaagtgtttaataaaactcaacatcccttcctgataaaaactctcaacaaactaggcagagaaggcatacctcaccataataaaggacatgtatgacaaacccacagctaacaccatactgaatggggaaaagctgaaagcctttcctctaagaactggaacaagacaaagatgcccactttcatgactcttattcaatataatactggaaatcctagccagagtgattaggcaagagaaagaaatatatggcatccaaattggaaaagaggaactcaaactgtccctctttgctgatgatatgatctgtgatcttatatctagaaaaacctaaagactccaccaaaaaactctttgttgagaaaataattcagtaaagttacaggatacaaaattaacatacaaaaatcagtagtgttattaataataaactagccaagagagaaataagaaaggtaattccatttacaatagtgacaaaaaaatatacctaggagtaatttaaccaaggaggtgaaagatctctgcaaggaaaactacaaagtactgataaaagaaattgaagagtacacaaccaaatggaaagacatcgcatctcatgactggaagaattagtatcattaaaatgaccatactctttaaagcaatctacaaatgcagtgcaatctctattaaaatatcaacatcattttttcacagaattagacaaagcaattttaaaatttgtatagaaccaggaaaaaaaaaaaacacctgaatagccaaagcaatcatgagcaaaaagaacaaagctagacgcagatatagtaaacaaaacaggatggtatttgtataaaaacaaacacatagaccaatgcaacagaatagagaatccagaaataaatttgcatgtttacagacaactgattttcaacaaaggcaccaaggtcatacattggggaaaggtcagtctctccaacaaattgtactagtaaaattggaaattcatatgcagaagaatgaaactggacccctatctctcaccatatagaaaaatcaacttaaaatagattaaagacttaaaggtaagatctgaaactattaaaatactagaaaaaatatagagaaaacacttcaggacactggtctaggcaaagatttcatggctaagaccttgaaagcacaggcaacaaaaagaaaaatagacaaatgggactttattagactaaaaaactttgacacagcaaagaaaactatcaacagagtgaagaaacagcctgttataagggaaaaaatatttgcaaactattcatttttctagagactaatatccagaatatacaaggaactcaaataacaatcaatcccattaaaaagtgggcaaaggctgggtgtggtggctcatacctgtaatcccagcactttgggaggccgaggcaggtggatcacaaggccaggagattgagaccatcctggctaacacagtgaaaccccatctgtactgaaaatacaaaaaattagctgggcatgatggcatgcacctgtagtcatggctactcaggaggctgaggcagaagaatcacttgaacccaggaggcagaggttgcaataagctgagattgcaccactgtactccagcctgggcgacagagcaagactatgtctcaaaaaaataaaaaataagaagtgggcaaaggacatgaagagccacttctcaaaagaagacatacaaaatgccctctgtctcaaaaaaaaaaaaaaaagttacttaaagtctgtgtctagtaagtctaacgtctgtgctgcctcagcgatggtttctgtcaatttatttttcccactgctttcctatttctttgtatgctttgtgggtttttgttgttgttgaaaactggacatttgactattataatgtgttatctctggaaaacaaatatttacattccctagagtttgctgttcttgattgttgatggcttaacttttgtacagccagggtttttaccgaaatttccctgaacatggggaacttaaaaaacaaacaaaaaactttttccaatctttgcatctgagtttttgcaggagcacccctttaacacttaataaggccatttgaaattcttcctcagcagtcatttcctggttgcactgagtctatatatcaaccagtggtggaatcttaggctgttctcagttctctgaacatgcatcctgtcccagacatgtgtgttgctttctaagttgccctatatacagagcacttttgaatttgaatgccctaatttcccaacaattctctctccctggcttttactcccaggctttaggaaagttattctatgtaccaactgtactcttcggccccaggcagttgcagtttgtttgtttgccttacaatgtttaaacaacgcctgctgcttttctacagtgggttacagtgtgaaaacagaaatgagcactttgtttcagtttttcaggtaacacccaggcaggttagaatagacatacctaataattgtgtataaagttggctctgctctctataaacaaggaccggagtcccaccctgggaaggtgggctgctgtcgctaagactgctattgagtcagggaagggttcataaagttttctttccattttcaagttgccttagaaaaaaaattggctgggcgtgttggcttaccctataatcagagcactttgggaggctaaggcaggaggattacttgagcccaggaattcaagaccagcctgggcaatgtgatgaaaccttgtctctaaaaacataaaaaatttaaaaggtaataaataattttttaaaatgagcatttgcttggttgctgtaaatctttaactatttcccaaagttctgataaagttgctctgacaatttctggttatttgttcaatatttctgtggcggtgtgaaagtttgtagctgcctatttctccattttgctgatgtccctctctccacaaattcggacatattgcatcttcattatgcacacacacacacacacacacacacacacacacacacacccctaaaaaagtaataataatgtaattatagagatggagaacaggctagtagttctctgggaattacggatgggtagagaggatgggtgttatcgatgtcaatgtttcaatatatgcaatatatgtatgtacatatatacatacacacatatatgtatacacacataaacacatacacatatgtatacttttcatatatgtacacatacagatgttcctcagcttaagatgggattacgttcagacaaacccatcataaactgaaactatctcaaattgaaaatgtatttaatccacctaatctaccaaacatcatagcctaccctagcctaccttaaatgtgctcagaacacttatattagcttacaattgggcaaagttgcctaacacaagcctattttatcataaagtgtttaatatcttatgtgttaatttattggatagtttttgaaagtgaaaacagaatggttgtataggtacttgaagtatggtttctactgaatgtgtattgcttttttttttttgagatggagtcttgctctgtcgcctgggctggagtgcagtggtgtgatttcagctcagtgcaacctccacctcctgggttcaagtaattctcctgcctcagcctccccagtagctgggattacaggcacatgccactgcgccaagctgaattttgtataaaaatactactaaaaagtagagacggggtttcaccatgttgcccaggctggtcttgaattccttatctcagatgatccacccacctcggcctcccaaagtgctgggattacaggcatgagccactgcgcctggccaaatgtgtattgcttttgcacggtggtaaagttttaaaattgtagatcaaaccattgtaagctggggacagtctatatacacctactttttattttgaaataattgtagagtcacctgcaagagaaatgtacagggaagtcacatgtacccttctctcagtctcctgcaatgttaacatcctatgcaactataatacaatatcacaaccaaaaaattggcatcaatatcacccatcctttctacccttccctaatccccagagaatgactagcctgttctctatctcaataattatgttattattattattatttttagacacaggggtcttgctatgtcgcccaggttggtcttgaactcctaggctcaaacgatccacctgactcagcctcccaaagtgcagggagtatgggtgcaagccaccaagcccagcctatgtctataattatgttattacatgattgttacataaaggcaataatgtactatgtattcttttgaaattattttttttaacccagcataatttcctagagatttatccaaggtgttgtattgttttttcattgctgattagtagtccatggtatgtatgtatcgcagttttagccatttattcatcaaaggagatttgggtagtttccagttttggactcataaatacagctgctatgaacattcttctacaaacttctgtgtgaaaatgtcatttctctgtctaagggtgcaaatgctgagttgtacaataagtacatcttgttttcaaaggaagtaccaaactattttccatagtggctgtacctttcctaccaacatgcatgttggtattcatatctaagtgtgtgatccatatctaagaagactatgtctaactcaataacatagggattttcatctaataattttttaattttaatttttaaattcaggtctatgattcattttgagttttttcattttttttttgtattggctgaaggccacaataatcttagggtcccatgaaaatgctttaaatcttttcaaataataagaacaaattaagtgcaattgatggcagcagcgggctgtccacggcggtcgctgtcatcaggtcagctgctgtggggagggtgccaggaggaggcagagctgggctggagtaatgctgtgctccacagagccagcaggagccagggtaagcgagagcccccccgccaagcctgccacgttgggtgccactgcaatggggctgagctgagccacctgccagcagggagcagcatggttgggcacagaggggtgggcagagaggggcccagtaaggacctggagctgcaaggaggcatggccagggctgcctgcatgctgctccacagagtaggcaggcgggagtcctaccctcccaggcacaggacctgggcatctctgcagtctgcacccttggggtcctgggaaagtccccctcccccctcaggcttggggggtgtctgctcctgctgcctggcctctccctgcccctggtgcctgctccaatctcagagcagggttggggctgagcccaggcactgttacagtctggccaggtgtgtgcacacttggagcagagctgacacaccagccccctgctgtcttggtcctttccggaatttgggccccaaggagctctggggggaagccgaggggcgcctgagggcaacccagcactggcctacaggtgcccttttgcacaagcagcctgggcaccatggatggtggcaggaggcagatcggctcctgggtggaagaggacaggttactggtgaagccccaccttcaggccaggctgctagtactgctgactggagtgggaacttgtggtgccttttccaggccctcccatggccgcccacagaccaattggcagcacttcctcccatctgaggcccataaaagccctgggctcagccagagcactgcagatgatgagacgtccagctgcagagaggagctaccctctctgctgatagctgaacacttgtcaggatgactagctgcagaaggagctaccctctttgcttctagaactcaacacttgttgggatgacttgcctagcagagaggagccatccccatctcgccaccttgcaggcgaagaggaggaaagaagagctgtggcccttcggggagctcagacctgggagctcttcaagccagggctgtcactccctccttggagcccttcggttcctggtgtctccaagcttccaggcaccaccatgttccctggtgccaggaatggaagctgcttgcatgtgcctggtccagctgcagccttgcagagagccagcgtgcaagctggcacctagaattgctcaccctgctgaggcagccggcatgtctgactgcacagttggactccatgctcactcacacacccctcacccctcacccctcaccacttcatgcagtctccctcggcaggggagggatcctggttggtagtgtgagccgagcgcagcctgcaaagccaagtgggcagagtgagcccagcgggcctgagcaaaacttggacaaaggtgccactggccacagaggtttccagccaaaaaccaacaccccaaagatccactaacataatcagttgggattacatttgtatttatagcaacacagttttaaaacataattttttgggcttggtggcctgtgcctataatcccagctattgggaagctgaggtgggaggatcacttgaggtcaggaggtctagaccagcctgggcaacatatggagaccctctctttaaaaaaaaagtgaaatataggccaagcacagtggctcacgcctgtaatctcagcactttgggaagctgaggcaggcggatcacctgaggtcaggagttcgagaccagcctggctaacatggtgaaaccctgtttctactaaaaatacaaaaaattagctgggtgtggtggtgcgtgcctgtaatcccagctacttgggaggctgaggcaggagaatcatttgaacctgggaggcagaggttgcagtgagccgagattgtgccattgcactccagcttgggcaacaagagtgaaactctgtctcaaaagaaaaaaaagaaatatagttttttttttggcaggatgtggtggctcacgcctgtaatcccagcactttgggaggccgaggcgggcagatcacttgaggtcaggagtttgagatttcataacaagcctctttcaatcacacctaatgaggtgacatggagtggggcccctaaatggctttaggatgggtgctggtccccacaaaattagaaggtggggccggggatggcaagaccctgtctctactaaaaatacaaaaattagccaggcgtggtagtgcacacctataatcacagctactagggaggctgaggtaggagaattgcttgaacccaggggacgcagttgcagtgagccgagatggcaccactgcactccagcctggacgacagagtgagactctgtctcaacaaaaaacaaagaaacaaaaagagcaaatataattaaattttttaatagaagaatgtacctctgatgttcttcctgacactaaatacatggtgactttccacaccaattcttcaattctctgtcagcaactgggtggcctacaagtcatttcaattctgacgtcaactccaggagttagttcagatcccacaaattaatggctcagtcccacaaggataccctccttcagacaccagtcacaagttccttaggccacctgcactccgactgaccagctgtgaagtcaaggcttcctataattccttcctcatggtgaataattcactagaatgactcacagaactgaggaaaatgtgtttcttacatttactagtttattatgaaggatgccactcaaataactgaatggaagagatgcacagggcaatgtaaagggggactatgcagagcttccgtgccctgttgctcttccccacagtactctcgtgtgtttgccagtgcagaacctcttctatctcttgttgaagaatttataactcaatcaccagccccttcttctccctggaggtagggcatggggtgaggctgaaagttcccacttttcaattattttgggggtggaaggaggaggtctctctctgttacccagcctggtgttcaatggtgtgaacacagcctactgcagccctgacttcctgtgctcaagcgatcctcccaccttggcctcccaaagtactgggattacaggtgtgagccaccatacccagcccccttctaattttgtggggatcagcacccatcctgaagccatctaggggccccactccatgtcacctcattaggtgtgattgaaagaggcttgttatgaaaaacaaaagatactcctgttagaaaattccatgtgttttaggagctctgtctcaggaacgagggacaaagcccaaatacagttgatctttgcacaaccaggggattaggggagctgacccttcacacaatagaaaatttacgcataactttcactccccaaaaacttaattattaatagcttactgttgacaagaagccttaccaataacataaacaattagtacatacattgtatattatatgtgttatgtattgcattcttagagtaagctagagaaaagaaaatgtgattacaaaagtcatacggaagattgttcattaagcagatgtggatcattataaagatcttcatccttgtcttcacattgagtaggctgagatggaggagaaagaccaggggttggtcttgctgtttcagaggtgtcacaggcagggaaaaaagccacctacgagtggatctgcgcagttcaaactcgtgttgttcaagcgtcaactgtatatacatttactgtagcatagaaaccaagaaagcaaaagtgcctagggccatggaagtcataacgtggccctttgagttaggcagttttaccagcagttttgagactatggcagcttggaatgggtccaaaaataagcatcagtggatgatggtagtggagatgcagtgaaatgaactggcttgggctttgatttagagtcagttggaccggctgatggattcatttgagaggtgaatgaaagagaaatcaggatgtctttacagcttttaaaatttgaggccagttatggtggcttacacttgtaatccctgcactttgggaggccaaggtgggtggatcgcttgagctcaggagttcaagaccagcctgggcaaaatgatgaaaccctgtctctacaaaatatacaaaaattagctgggcatggtggtggacacctgtaatcccagctacttaggaggctgaggcaagagaatcacttgaaccctggaggtggaggttgcagtgagccaagattgtgccactgcactccagcctgggtaaaagaacaagactgtgtctcaaaaaaaaaaaaagaaagaaaaagaaaaaagaaaaataaataaaattcgaaaccttgctggctctcttttaataggttttctttttcaatatttaaggaattttttttttcttttaagctgctgataacttacagcaatttggtaaggcatacttttgcaaccaaaaattcaaagatttgcttttccttcctacctaattcctccaaaatctggaaactattcatgaagattcttatttttatgacaatatggttatttgcataagttcaataagaagctcttctcttcaacaaaatacaactggaaatattggttatattaccaaagctttgactgcaatgtcatattgtattaatctgttctcaccctgctatgaagacatacctgagactgggtaatttataaagaaaagaggtttaattgactcacagttccacatgactgggaatgcctcaggaaacttacaatcatggtggaaggtacctcttcacggggtggcaggagagagaatggttgccgagcaaagggggaagccccttataaaaccatcagatctcgtgagaactcactattacaagcacagcatggcggaattccctcccaccccactgccagtgctgttccttcattcattcattatcaattgaattgatgccgattcaattatatccacctagtcctgcccttgacacttggggattattacaattcaaggtgacatttggttggggacacagacccaaaccatatcatatatatatatatacgtatatatatatattcatatatatatatactatatatatattcatatatatatacatatatattcatatatatacatatatatatgaatatatatattcatatatatattcatatatatatgaatatatatatgaatatatatatatatagcaatgtcatattttaaaatgtgcatggaatcatagaatgccaattttcaagtgttctcagctttatagtgaataaaagtagtcacttccaggcaggcccagaagcctcaagatattagatattgcaggcaaagtctgatgtctgccttggtttgacttcctaacatcaagaggtttttaaaagtccagatttgttgtcacaatttccagcaaaataaatttaaaagaagcctatgtggttattcttgccgcacttatgtaaataatcaggtcaagtttgaaactaaattaattttaaaaataaattggtcttaccatgattatctttggtagaaatgggaatgactgtagagagaaaaattatgtttctgaagaaaaccatagtacacctgttactagattgcagctttgttcattgtttttgagtttttatcatctatctatagactagcctggatcctgagttcttgttgccttcaatatctgactgcaattctccaaccatgaacaaaaactgctaagctgaacaactcgatataaatttcaagggacaagtcccatgcttgatgagggagccacatagagagtttagcagaacacctgatgccacagccagagacatttaaactgcaaaccaggatgagaaattgctgacatcatgttgtggacagcgttttccaagactgtcagaataagactcgctaccatgataagactccttcccttcttaattttttcttgcttatgcccacctcttccacttggcaggataatgctgtagttaaaatttcacaattagtagtttttgtgggtaagttgataaagggtcaaacccaaacatttacaggacccaagagagcttttattccacctagtgggtaactttagcaacatccctaatgcaactgtttgttcaaattttactagtggcctcttttgtagagttagcactctttgctttaatttaacccatttctgagatgctagatgatagaattgctgcgtactaaccaaacggggaaatctgtgctgttgctgtcacttcttgttgtacataaataatctggtattgtagagactcagtttcaaaaagttagcaggctacttggttaaaacaggtagatttctcatctggctcattctttgatctatttgattttagttggtttggtttatggcaaccctagctaagaagcatactccgaactcttggcattgtcctcctgatagtcacaattctcaattatgttctctcaaaaagttttacatatttgcatacagccaattgttgaatgtcatatggtctctcttcagctgcaatgacagaaatacaaaatcatgaggacactgtaatctataaatgatgtgttgagactggaaacacagaatgatgttaaatgagggtagtgctaatgccctcagtcttagtcacaatttcacctaggttgttaaataaaaatcatgggatgccattgttttcaaccaaattcctgcatcaggcctccagatcagactaaaaatcaaaatggtgtcacccatgttcaccaaaacaaaactgagttatctggttttccaaaaaatggtaagagagatagccaattttccaaacagaagtttcaatctttaacaggcatgataatgaaatttcctgttttaatccttaaaatagaatacctgaagtaacccaatgttaaccaatcagttttctttctactgttctgtctccacgtctccaccttaaagaaaagtgactttgatataaccaatctgctttttgttgtttctgccttcttcagtctattttctgtctctaaagttaacatcctctgcttgattcattgcaacatttattctattttgtggaatgaagttttgtccaattctaggagtgcaataatgccaatgagatcttgaatctcaatttgttttacttttgtttcttgacaatggagaggtttaggctagagagcattttcaaagtcatgagcatatagacttcaagtcaaccagttagatgagatcacctggtgataaaatagagaagaatgcaaggaccgagccctggagcagtccaacatttaaagattgagccaaagaggagaaaccagcatatcaaaaaggaggcccagtgagggaacaggactatctgtgacgtgtaggtaagttcagggggaaaagtgtttcaaatcaaaggaaccatgtcaattattcgcgattctacagagaggtcaattgagatatggatagagaattggcaattgcctttggaaacaagatcattagtaatcttgataagtgatacagatgatggaagccaaagctcgatcagggtagactgagaagtgaatgtgaagtgagaggtaggaacaagcactattggagagatcttgaaaaacctttctaagaatttatgaagatagcagaaaaatagggcagttcctagaggcgattttggagtcaaaggaagtttattttagatgggagaaatttcaatatatttatatgctgataggagcaattcaattgagagggaaaaaactaacgatgctggagggtaggtaattgtaagagtaaaatccttaggaatgtgcgtgaaaaaaatccggtcactggtaaagggactggccttcctaggcgcagggacacttcattcatagcaacccaaatgttactatgcagataagggtggttttgatggtgagaagataagggagtttatttctgatatctttcattttttccatgagttatgaggcaaagttgattagtaaaagtgggggttggggaggaggtatatagaaggctttcagtagagacgaaaaggaatgaaataatccttccatcaagtctacttaaatgtcaatttagtggataaaaccctcccagaattaagtacatctcccaaaccctttctctctctcaatgaccttttgctcctttctggtactcactaacatttgcaattgtatctttgttcgttcacttctctgattccccattagagaactacagaagggcacggactttgatttcaaaatgtatatttagccgttagcacaaggcaagcagatggtcactaaataaatacttttttaaacaaaaatgttaatgaacaccttcaaaattttgtcttacgccacctcgttaaaatacttgtttgtgcaagtcacttttcctctctgagctttcatttctgaatctataccatgggaattatctcttccttgcctacctcccctcgttatcaagaggatctgagccaataatgatagaaatgcttcattaagggccccttaaatgtaatggatttctatttttagcccactggtagcctcgcaggtagcaggtgctgaaaaagccttgcttattgggggttgggggacagcattgtttctgtgaccgtaggcgtcgaagctatgcagaagcgttccgcggaccgcagagagatggggctcaggccagcatccctctcgctccggcccttcccgggaggagctggccgagctaggatggggggcagggagaccgagggggcagtaactgtcaaacctcgccgcttggcgccattatttaaatggaacgtgcctgtctcgcagctgtacgtgcccggggcggggcttcgagcgccctgagcggggcggaggccagaggcgggctgggaaggtggaggggcgggccggggcggggccaggccggctagaggggcgggtctagcggcggcccccggcgaagttcactgcgcttgcgctgacagacgcaagatggcggacagtgcggaactaaaggtaaagcgcagctcgaattcacttctaatattcggccgcggagacggcgccgctgctgccaggggggatgggtccgaccctggggggcctctcgggcctgactccacccgggcctggagttgtagggagagaggcgcgcccggtctcagcagagggggcccgcctgcggcgggccgcgggccccgggtgcctcgggggcgctgacgggtcgtccccggcgtgttattgttgtgggcgcctctggcgggggtggcgggggaagagatagggagtccggaggtaggggctgcagctgtctcatgggctcggctttttcaccttccagttagcctccctgccccccatggggagctggggctgggggcagggtgctctcgtaggggggattgggaaagctccccgtggccgcttcctcttcctcctttgcagtcccgggctcctgtcaggcgctcttctcagacccccgggaacttggcttcggccgccccgcccctccgtggatcccagtagcccccgccccggactcggctttccccggctgctcgcttgtcaggaagcgcctggggtgccccgcttgtgggaagcgcgatcccggggcgatagggtggggatctgggggagaagctctggtaaagtttagcgagccccgggccggcgttggggttcggctgagaggtagtgagcgggacgttactctttctctctgattccgggcagccgaggggagaaaccccctcgaagagtgtgtctttggaagcagtgttgggagggggggatgcagctacctctctcccttcttttgccttagctggtgtggagggtgagaggagcctttgggggtctctgcacacaccatgatggcgatgctgtagctgatggaggtgaatggttcgtgtttatatccccccattgccttttgtttgtagggacatcttgctggccatgttgatttgaacgaaattctcccctcatgctactccaacccccgataaatagaacgttcctcttaacagtaccaattactcacgcctcacgaaattagatgaaagggtgcccccttttccccgcttttctcccaccccaatctttacctgatgatggcttctttaccgtagcagatataccactacacaagcagttgggggagggggtggtggaacccttatgactggattgtgacaaatggggctccgcttgaataattttggtttagtagcaggcagttcttaactaacgcgtattatttcgaggctctgaacgcgatcttctctgtggcttcctgtgtgtgtgaacccagcagctggttatgtctcgacccagagaactgacatctctgtcagagaggagatggggatatacaattgtaaatctttggggagagtcttctttttataataaataaaaattatttaattttttccccgttataatgaaacgacaacttctagaacaaccaaatgccagatttgattctgtagagtttttcctgtggaatatcctcaccgaaagagcttttctcctaataacttcacaatgtttacactccaagattcgtatgttaaggtattggctttgagtgtcattcttttaaaatgtacttctaattacaaatttactgaagggagagcagatttacaatggatggttttgatttttccccagtttcaaactattgactgaaatgagaaagccttaggaatttgaatatttggagataattaacccttgaaataaaaaaaagcacacaactttaagacatgttttctataatttttctcttagagtcactatgttgctgtgatctttgccttgtaatatttattttgttaggagttcttttgaatgatagctaatcagttgttatacatggaccatagaataaagctgaaaagcttgtgcagactatattgtcactcttgatgctgtccaaagaaactagtatggaaagcacatgctgagagatttccttctttgttctttctcattttaagaaagtgcctttggggatagatcagatccctggtgtgagtcttgttaggtaaagtttctctttacgaaaatgaaccagtatcagataaacaccaaacacttgaagaaatgttatttttctaaaattaatctcgttttttgtgctctcccaaatctactagagtttttccagaggaagttttttttttctactcttatgttcctgttgtataatttttcaaattataataactgttttgacatgttggtatgtcattgtgtgtgtctgagactttgaggagctgtgtgataaattgcttagctggtgatagcggcgttaaaaaaatttggttaatactttattgtggttagatttgctgttctttttttgaggggtggaggaggtgatctcaggaacgcctaccatagttatttgagaatgtgttaaaaaaaagagaatgtgtatatataattttctgtgcagtaaggtttggcagatactccttttggaaatgatattttctgaaggctttttgtttgtgattttttggaggtaaatatcatacattcctaatatgataggaaaaatcagagtaagaagaaaaaaatctagattttttgaaattttaaatgggaatagagtacttcaactgtgaagctttacataaaactcagtgacttttcattattttaggtttcagccccatacttcattttgctgtggattgtattcataattattttcctcatggcttttttagtgagtccttttaaatctataagaaatgtgcaaagatcagatgggaaaaacagatagatctttatcccctgtaggaattgtgcaagctgcaacacttcaagatattgccaataaaaattagattgtgagtcatacatatcaaaatgaattctctatgcacatttgtttatgaaaggtttaatttttcattaggggagtacccataaatgtcatttttaagaatgtggagggtattttgtcatctttaggaacttagaagcaggagggtgtgatggccagatgatcttggtagttaataagctgacagcttcatgaaactcctcttaaagtaatttaaaaaaaaatatgtgtttttttggagtaaaactcaaaccaagttatagtgccattttaatttacaggaagaagagtgggagagaagaagtccatcagcattttagtggagtaaataatgaaattaaatgggaagagaaaccataattataaaagttactatgagtgtgtcagtgaattctattgttattttctgcctctttattttcaagaaatagctacttaattttgatccttacgctgtaatttgtctgcttttatttcagatagagtcaagtacatctgatagtttattcatggatttgatttgaatctctataacttgcttttgtcaagtgccacatttagatggcttttgttttatgtcattatttttatcaacagtattttaaaaactctacagtatagtttataaaatactacgtatagtttctaagtatttcatatgattgttttgaaatacctccttcttttcatccaccgttttctcctgggcgatcccattgtctttttcttcaaagagtttcttgtaatccctgttgattgcggtagtgcttagtggcgagtccatagctgattaaccttgggtgtctcctggtgaactccatcagcatgctgctccagggttcttgctgaggcttttgagtttagtgtaatttgtacccttttttgctggtaaccagggataagaaaataaaatggccaatggttgtagcgggaactgggaaaaagtatccaagtctcagaaaaactgggtgtttatgatgagatgtagcctttcaaaacaacaaccaaaaacggattcattacttcatagaattgattgtggtgttttctgaagtgtttgactctggcatgaagcatcttgcttttttaatgtttgaataataatatcttacttatatagtactttgcagttcataatatattgcattatctcttttgatctttccaacagttctttgaggtaggaaaggcaagtaataactaaatcctttttatagatagagaaagtgagcccagaaagggtacgtgactattgcaaggtcatacaaataaaagtggcagggacttgagcctaggtcttgtgtagtcctccttaaaggtcctacagcagacctggagtcctctagggtgcccagttcacagatttctacttatgttgttgctgatactttcccttttggaaaagctctatgctagggtatttttggatattctagggcattttgcaagcttccttgcaaaaagtttggagtttgttagttggaatcatacacattaatttttgtaagtatcattttgcttgagaaaatttcagagaatctgagaagtaagcagaaaaataaacagtacctgtaatcccaacactcagagatatcatggttaacatctgggtatttatccacttaagactttctctctgtgagcatatgtatatgtatattcatcataaaaagatacaacactgttttttatttataatctgctattttcatgtctatccaggttagtaaatacaggtctatatgatcatttgaaaccttacattgtgttttattaaactagtccctgtcagattattctacttttttttttttttttttttttgagacggagtcttcctctgttgcccaggcagtagtgcagtggcgcgatctcggcgcactgcaagctccgcctcccgggttaacaccattctcctgcctcagccttcggtgtagctgggactacaggtgcccgccactacgccccgctaacttttttgtacgtttttagtagaaacggcgtttcaccgtgttagtcaggatggtctcgatctcctgaccttgtgatttgcccgtctcggcctcccaaagtgctgagattacaggcgtgagccaccaccgcgccaggcccagattattctcctttttttgcagtgtgtttgcagacatgtaccaaagtttgcagatgttttattttaactaaatatattgatatgacagatcttttttgtgctttagaaagcaatgcaggaccggatgccatggctcacacctgtaataccagcaccttgggaggctgaggtgggcggatcacgaggtcaggagttgaagaccagcctgaccaagatagtgaaaccccgtctctactaaaaatacaaaaaattagctgggcgtggtggtgggcgcctgtaatctcagctactcaggaggctgaggcaggagaatcgcttgaacctgggaggcagaggttgcagcgagattgcgccaccggactccagcctgggctacagtgtgagattccgtctcaaacaaaaaaaaaaaaaaaaaaaaagaaagcaatacaaatgtttattttatttttgtagagtcaggggtctcactgtgttgcccaggctggtctcaaattcctggcctcaaacagtgctgcctcggtttcccaaagtgttgggattacaggtgtgagacactgtgcctctgtgctcggtttttacaggtgtgaggtactgtgccactgcacccactctacaaaattagctaaaatgttgtcagtgaaataaattagtcattcttggtttgttcattgtcatacctttattgtttatgtttctgtaatatgtgagataagattattaaatgatggcagatacaggttttacaaaatgtaagcaaacattacttcagcatcagaatgtttgataaagtatgaaatcgattatgaagtagtattttataatctattcatactattctatgaatagtagaatttcaagtaggcaagtatgtttgattttggaaattatatcacagtgaccacatattgcaagtttttgtaccttatttagatgcttatcagttttttttgttttgctgggattacaggtgtgagccaccacgcccagctgatgcttatcagtttttaactggcattttaaaactatattgaacattgccagacgtggtaatcccagcactttgggagccaaggtggacagatcacgaggtcaggagttcgagaccagcctgaccaacatggtgaaaccctatctctactaaaaatacaaaaattagccgggcgtggtggtgcgcacctgtaatctcagctactcaggaggctgaggcaggagaattgcttgaacctgggaggcggaggttacagagagctgagaccgtgccactgtactccaggctgggcgacagagtgagactccgtctcaaaaacaaacaaacaaaaaatcccccaaaaaacaaacactatactgaacattaatatagagaaaatggaaataagacttcaccatatttttaatctcaaaacaaagtgttgccatttaaattgggaggtaacatagtttcaaggatccacaatctctgcctccggggttcaggcaattctcctgcctcagcctcccgagtagctgggattacaggcatgcgccactgcgcccagctaatttttgtatttttagtagagacagggtttcaccatgttggccaggttggtctctatctcttgacctcgtaatctgcccgccttggcctcccaaagttctgggattgtaggcgtgagccaccgtgcctggcccaggatctggttttagaaagataacataggcaatgaaagcatttttatttttagaaaaaacctttatgagttaaaccaattaataaatgcatatgtgaattaagaatgctatttgtgcaacatctgaaaagtagtgcatgtagaaggaacttgaaattgatcgtactctaaatttgattcgttcgactttggtcttcacctaaatctgtatttatgtaacgttttatcattaggatttctttgaaataggcagtagagacaattttaaagtacttagttgtctttaaccatcaatttcagaagtagtattaattgccactgcactttttgctagatgtttatgactatatttccccttccatgttaaaaattgtgcaactcctgttacttttgattccctctactcttggtttcagtagtgtcacatgaaaagaaaattccctagaacccttccttcagagttttctggtaagtcttcattcttagctatgaacttctaaaattcgtcaaaatgaagaaaccacctttttatttttcagcttttctttagatcaagcaaacaaaacaaacataaatcctttgaatattaactaatgatggagatatcagtaactctcataggactgttgtaaacgttcctatttttgaaaacttaatctcttttttaccttttttgctattcactgctttcagtttacccgctttggttgccgggttaatttcaccaaaacactcctttcattctgtcactcctatctataaaaactttgaatggctttctatcgaaaactggataaagacttagttctcagtctagtattcaagattttctattgtctggccccattccactttgtgtgtgtgttttgtctcttcagctgtatagcaaaagcccttaacttaaagccagagctgttagtttgcgtctttttgttggctggtgttctgtttgtacaccccccattctcccatccctaccctgtggacacaataggtgtttttaatatacatgtgtcagatgaacaaattatgtttaagatttgtttctgtcagagactggggcctgatactcttgtctataagacaatctaaattgaaaatatttttagggtcatatcttcgctcttttttcttgctgctgcttagatgaacttgaataacattaaatccagaataatttatcaagggctgttttagatttaccttttacattattttaagttatagagataataagtgactacacttctcattgtaatgatctaacagtaaatagggtaaaaatggaaagacctcatcatcttcattcttagagggaatcattttggtgtatatctgtgtattcttatttgggtgggcagggggaggtgacagctttattgagataaaattaacatatcccattacagttcacctcgttaaagtgcacagtcaggtagtttttggtatattcacaaagttgtgtaaccattaaccacaatcagttctagaatattttttcacctcgaaaagcaaccctacatccttttagcatcatccccttcccaaaccttacctcactcttagccctaggcgactgataatctattttgagtctctgtagacttgcctattttgggcatttaatataaatggaataaaaatatgtcactttttgtgtctggtcttgtattcatttttttctctgcatgggcatttaaatgtgtatgtctgtataatatttttaatttattgtgtgtgtgtatgtctagatgagaacaaaactaggcacatagaaggaacttaagtgaatgtacatgtacataaatatcttttctaaaactgtgagaccataccatatgtagcatcctacagtttgcttttttttacaatagatagtgaagatctttccatgacatgtccagacaatgagatggtctcattctttttaacagtgtgtaatatttcctatgtatgtttatagagatttacctcttgaatttatcagtgtatatggttaaaagttcttaacaacttgttttgatggttttgctatacactactggtttttttaaaaaaataattgccacatttaatgtaacctctgtagtattaatgctggagtttcacttaacaataggaatgaaaacatcacaggtaagggttgtatagcttgaggagaaatggaatgcagggtctttatgcagttctggcagtgctcagccaaagcaattcattttgtatttgggtttctgaatgtgagcaagcctgtttttaaaaaagctcatggcatagtgcttaaaatagaacttaacatgctatcttgtgctttatggtgaattttaagactttttcttgcagtcatgcaagtctaatcttaaagattggaaagatttcagagtaaatattttttctcatatgttaaaatcatcattctggtctatgggcttctgtaagttacccaagaaggggactgaagaggcacagaactggctcagaaactggcttatagtagattctcagtaattgttatttattaaagaattatttatcacattctgttatttattatatttttgggtatctgctgtgtatgaggtaccaggttattggtgattttaatatattatcacatatgtgtgtatatttatttaaatatttctgttatagcggaatgtttactaaaaattatctttttaaaaattatacaagtaatgcatcagttcttacagaggttttcaaagtctatttctcaggcctctggtggttccccgaagtttttctgagggttctccaggtcaaaatgattttcctaataataggcattatttacgtgctgacatttgcaaaatcagtggtgggtaaaactgccagcaccttggcacaaattaaggcattggtactaaattgtactagtagttgtgttcttcatcactgtgcacttggaattaaaaaaaaaaaatgccagttaaactttatgtccttgatgaagcaataaaacttactaattttattgtatctcaatccttgagtacatttaaaaatatattttgtatgatgaaatgaaaagtacctgtaaaacacttttattgaatatcaaatctgatggttaactcaaggaaaagaacttgtgcagttgagttgtgagctttttaaatggaataccatttttacttgaaaaaatggctggcaaagtatggttatacagactagggtatttggcatacattttcatgaaaataaacaaagtgtgcctgtcactacagggaaaacaactgacaatatttgttactaatgataaaatttaagctttcaaatgaaaatagaactttggaagacatgtatttgccactgtgagcttgacagtttcccaatacttgacttttttgataagatcagtgtgatattaatgaatgtgttatgttgaagttgcatagtgaaatatgtcaacatttggaagaactgcataactcagtgaactaatattttccaaataaccaatgcatgatattacaaaatcatgcctggataaaaagatccattggaaatggaagatagaccaatgaatttcagtttatcagagtgggaaatattcattgatacggtttcagattcctgcgttgcagcagcctttaagaacctgccatttgttgtgttttggtgaaggatcaaagaatatcgaaagttatctgaaaaggctagagcattttaataaaaatactctattttttcccaactctatagagcttcataaggctagatttcctttatattcttcatccaaaacaatctaatacacagattgaatggaaaagtagatgtgagaatcaagatgtctttattaagctagatgttaaagagatttgcaaaaatgtaaaaccatgatagtcttctaatttttattaaaaatattttttaaatatgagatttatgttaacaagtaatggattaattaattaatttgttttttgagatgggctttgccatgtcgcccaggctggtctcgaagtcgggggctccagtgatcgcctgcctcggcctcccaaagtgttaggattacggcgtgagacaccatgcccagctattatttttttttaaatgacaaatcttttaaagttttctgctttaactgcaaatacagtaaatattgatagatttaatcgacataaagtttttttgcgggggggatggtcctccactttcaagagtcccaagagcaaaaactttgaaaacttgatcttttttaaaatttaaaatttacagtacagcagtgcctaatttaaaatgggacgatccctttcaccttcccactcatggtattttttataacttaaaaggaaaaataaggctgggggcagtggctcacacctgtaattccagtgctttgggggagacctaggcaggcagagtgcttaagctcaggggttccagaccagcctggacaacatggcaaaaccacatctctaccaaaaatacaaaaaattagctgggcatgttgatgcgcacctgtggttccagctgcttgggaggctgaagtggtaggattttttgatcctgggagacagaggtagcagtgaactgagatccactgcactccaactgggtgacagagtgagaccctgtctcgagaaaaaaaaaaaaaaagaaaaaatttatttctagtgatctcttacaaggcagtttgctaagcagagttatttaattaaatcctgcatctctgtaagtaatgctaaacggtagtagcttgcattgcactgaacgaatgtgcttgaagtactttttttttttttttttttttggagacagggtctccctctcttgcccaggctggagtgcagtggtatgatcatggctcactgcagcttcgaactcctgggctcaaatgatccttccacctcagcctcctgagtagctaggacttcaggtgcttgccaccatgctcagctgactaaaagcttttttttttttttttttttttggagatagggtcttgctgtgttgcccaggctgctctcagactcatgtgatcctcatgcctcagcctcctaaaagtgttggaattcaaggtgttgagccactgcacctggcttgaagtacttgtaatcagtaatggtgtgggaaatatataacttaattttttcaaggttatgttttttcttttttcttttttttgagacagagtctcgctctgttgcccaggttggagtgcagtgacatgatctcggctcaccacaacctccgcctcctggattcaagcaattcttctgcttcagcctcccgagtaggatgcgcaccactgtgcccagctaatatttgtgtttttagtagagatgggctttcaccatgttggccaggctggtcttgaactgctgacctcagatcatccacctgcctcagcctcccaaagtgctgggattacaggtgtgagccaccatgcctggcctgattgctttttctgtagtaaaatataagaatcatatgaataaatgaaaaattccctaacttaatattagccaagaacttcctctccagcagagcttagctcttaccaaatatatatgattgatttgcattctacctattttgtttttttcctttcccttttgtgggataaacttgaaacaggacctagaaattgtaagactctgaatgcttttcagtttctttctgcatttctttagagtggtgtgtgaaaaacttcagcctctgttccttaaacatctttccccagggtgtcaaagtaagactggaaaaggaatatttttgtcccagaagttattctaatatgtgatttcaaaatcaggtagcatcttaaaggttaaagacctttaaaaaaaaagtatagtattttgtgtctaattgaatcataatcagggaaaagaacatgaattttagaattgccattagtcttcacctctgaatttagatagtcccaggaatgagattaatggtcttctaagtgtgagtaggtctggtctgtccattttttcccgagaggaattctataatctcttgttgaggctacttacctggctgataatgtttggggaacaaggcaggataaaggtgtcccacttatgagtatgcagactttgcttaatctccacttttagatttgtgcctcacccttgatcttagttccatgctggtctgagtctggagcctctctggttcagttgttccagtaatcctctggcctcttgtgttacgagaggctagtgggcatggtagggaagttgtctcatggatatttagttagaggagacctgagggtgtaaccatcctgtatgttcagattttctaacagcccccttgtaccttgccccctgtgtttttagatatgcttgcctttctttagtattcccctctctaggcatttgtaggttgtagcttcctcttctgatttagttaccactgcattgcctgcttttcatcatcaaaaagtttgttgaaatttctagttggttattttttttctttttgtccttgtggattaaagatttttctttttttcttccctcactgtcattttgtttctctttatggggggaatatggcagacatttgtatatggtgaattcatatttaactggaggtcattgtaaactttctgtgaagcttataatacaaactatattaatatataataatgattcttaaatagatgcctatgttgaattaagatttatattgagtggtagtagaaatcgtgttattttctaagagaaagctaggttgcttttttaaaaaaaattaaattatatacagcgtagtatgtataaccttatagaaaaatgtgtaacttatagaaaggtagtaaaacaaacatcaagcctaataaatagagcattctaaaaccttgaggccttcctttgtgcaccctcatcctctcttccccatttcttctaggtaacttgtatcaatagtgtattttaaaggtgaaaactaggagtgaaacagtagttttgtatattattatttgtaatgttgtcttaaaaccattgcatctaatattttatatcatagtcttgtaaatttccaaatttactgtagcattcttcaaagaggaggattccgtaggagaaggtggagaggaaagttttggagacctgaaaatatgtatagggtgaacgtggtggttcacatctgtagtcccagcactttgggaggctgaagtgtgcagattgcttgagtgcaggagtttgagaccagcctgggcgatatgacaaaaacctgtgtctacaaaaaaatacaaaaagtagctggctgaggcatgtgcctgtggcccagctacttgggaggctgaggtgggaggatcgcttgagccaggaggttgaggctgtagtgagctgtgatggcgccactgtactccagcctgaaggacagagcatggccaatatacgtgctcatagatttcagtaagtacatctggtgatgtttgtggaagaagggacttaagttaattaccacagtgatttacccggggttaagtctttttttttgagactgagtttgcactcctgtcacccaggttggagtacaatggcgctatctcggctcactgcaacctctgcctcctgggttcaagtgattctccaccctcagcctcccgagtagctgggattacgggtgtctgccaccatgcttggccaatttttgtatttttagtagagaagggattttgccctgttggccaggctggtctcgaactcatgacctcaggtgttccacccacctcagcctcccaaagtgctgggattacaggcatgagccaccgcccctgccctgggttaagtcttgaaaagtgctcaggcttatgtgtcaatgctctcatccacgaagaagttgaatcgtcagagttatgagaaaagtccagctttttggcaagaccattaaagtctgtgttacaccttaaatgtttttgtcctttttttttttttttttttgaggtggagtcttgctctgtcacccaggctggagtgcagtggcacaatattggctcactgcaacctccacctcctgggttcaagccattctcctggctcagctgccccagtagctgggattacaggtgcgcaccaccgtgcccagctaatttttgtatttttagtagagacggggtttcaccatgttggccaggctggtctcgaactccagacgtcgtgatccgcccacctcagcctcccaaagtgctgggattacaggcgtgagccaccgcacccggccttgtccattatttttttggatacatttaaaaaactcttagtaaaacataaaaatagttattcctttactgggcttataataagtattctttgtggctataggtattctctgctaaatcttgcaaacaagcattctcccttacgctcccctcctccttccttttgcccgtttgacctttggtatcacatttacttaaagcaaggttcttatccagtcattctatcaataaaaatgagtgctgatttatatgccaaatcagctgtgttaaatgctcacacatcatttgggaatgaaatagagtttttgcttttgtgaaattacattctaggctgggcacggtggctcatgcctgtaatcccagcactttgggaggctgaggcgggcggatgacaaggtcaggagatcgagaccatcccggctaacacggtgaaaccgcgtctctactaaaaatacaaaaaattagccgggcgtggtggcgcgggagcctgtagtcccagctacttgggaggctgaggcaggagaatggtgtgaacctgggaggcggagcttgcagtgagccgacattgtgccactgcactccagcctgggtgacagagcaagactccgtctcaaaaaaaaaaaaaaaaaaagaaattacattctagtactcctgtaactatatgaaaaatagtttggttctcttgtacctttccatatttgaatttttatagagagcagatgttttaataattaggaagaactttattttgggaaatgttttctggaatatgaattaacaatgttaaatgcattgttaaagtttaatagtcatttgttgtatatatgcttcctaaaggtagtttttggaggaaggagatgtgggaggagcaaggaaaagatatgaaagagttattgtaggaagtttgattgctggctcactggaaagtttagtgagatgcctgtgcccattgagattgacgactgtggatgtaaaataacatccatctgcatgagtgcatgcattcttttctcctacaaagtgggaactagttgaatgtgccaggcatggagggacaatggaattttgcaaagaaatgtttaggggctaatggatagggcatgacaacatcaatgaattagagatctttgtgaattgaattcttgaaatgaagcaagtaagaaaaggaggttgtagttggaaaatgaaatgttcgagttagtgattttgagggtggtgcaggttctgctggaaatgtctaagatgtggcctcggaagtgggtagctgagggtggaaagtaatgatgaggagttaagttggagcctgaatggccaaggcaggtactaaaactttacttcagtgaatgacaggatgacctagaagatggactgtccagtactatggccactagttctgtgtgggtattgagaacttgaaatatggttagtcctaattaagatttgctgtaagtgtaaaacatactggatttcgaagacatagtatgaaaaaaagaatggaaaatatctcattaatgattgatattgattgcatgttgaaataatattttgtttattggattaagtaaatatatatcattaaaattaatttcacctacttgtaattttttgaaatagagatgtggcctcactatgttggccaggctggtcttgaactcctgggctcaagtgattgtcctacctcagcctctgaaagcgttgggattacaggcatgagccactgtgcctggcctttttactttttaaaatgtggctagtagcacatttaaaattacgtgtgtgtctcaatatttgcagcttacattgtatttcctttgaacagcacttttctagagatattactgctcataagtagaatgggaattaggtgggaggacaattgtaggggtttgtagaacccagtggcagaatcctttgggagagggagtggacattgaggcttattttcattgagttgctggtgctttctcttctgctgttgtttgttcttggaattaatgaccttcttttcacccccgcccccccgcccctacctcccttccctccatggagtggctaaccccagggagtttgcttcattctttttttttttttttttgacagagtctcactctgtcgcccaggtttaagcaattctctgcttcagcctcctgagtagctgggattacaggtgcatgccaccatgcctggctaattttttgtatttttagtagagacggggtttcaccatgttggccaggctggtcttgaactcctgaccttgtgatccacctgcctcggcctcccaaagtgctgggattacaggcgtgagccactgcgcctggccagcttcattcttttgaggagaaaaataataaacgataatagaaagcagtaccaacaaaacaaataaccatgtaaatctaagtagttaacaatgtattcataagannnnnnnnnnnnnnnnnnnnaaaacagaaattagccatggggagtgacgtcaatctgtagtcccagctacttgggaggctgaggtgggagggctgcttgagcctgggaggtcaaggctgcagtgagccatgatcatgctactgcattccaacctgggtgacagagtgagaccctgtctttaaaaaaagaaaattaaaaaaggtgattactgggatattctttgaagcaagggtaacagcatgagcaaaggtaatgaggagagaaaacattgaggtatgtttgcggaacagctactagatccacatgtggatatctgtgtaagagagtaataagagttaatgggaagttggccgggcgcagtggttcatgcctgtaatcccagcgctttgggaggctgagatgggcggatcatgaggtcaggagatcgagaccatcctggctaacatggtgaaaccccgtctctactaaaaatccaaaaaaaattagctgggcgtggtggcgggcacctgtagtcccagctactcgggagtctgaggcaggagaatggcgtgaacccaggaggcggagcttgcagtgagctgaaatcaggccactgcactccagcctgggtgacagagcgagactccttctcaaaaaaaaaaaaaaaaaaaaaaaaaaaagagttatgggaagttggggccagattgttatgagaattttccacattgaaactatgtatggagtctgaaactatgttgaatgctataaaggaaagggacagaattctgtaagaacattaactaggaaacctgactgagttagtgtactcaaagaagtcttccctatttctgaaccatctgaactacagacttcctccacatccaagtcttttcaaatcttcttaatgttatgccttcctttccttctcagttgttaccgtcactatttcagactcttgtagtgtcaattttgtattcataaaacagcctctaaattggtatcatatcttacatcccttttcaaattatttactcttcaattagatttatttttttatgtccgtttcctccctttaacattttctgcaattgaaaatgtttttacaacttctcattctttgtaggattaagtataaacttcagttttgcccttaaaactaaaaaattattgtttgaacactagttgctgagtttggatgccagtatgctcagtaggcactgggtacatttatataatgtccttatttgtgagaggttatatgtataatttctttttttatttttttgagatggagtcttgctctgtcgcccaggctggagtgcagtggcgcaatctcggcccactgcaacctccgcctcctgggttcatgccattctcctgcctcagcctcctgagtagctgggactacaggtacctgccaccacgcccggctcatttttttgtattttttagtagagacggggtttcactgtattagccaggatggtctcgatctcctgacctcgtgatctacccatctcggcctcccgaagtgctgggattacaggtgtgagccaccgtgcccggcgaggttatatgtgtaatttctaatatatttgcattaccaatatggtttgtaataattgacaggtgccaaaccgttgttactcatatttattaatgatgaacaagacagtctctatagacagagcatgtattttggttaagaattgacaagtaaacagggcctctctacatatggcataagagcggtaaactgagttaaacaggagagcacataaaagcgtaaatttttttaatgttaggagtggattaaggaaaatatcccaaaggttgtgacatcaaaattgagaacttactgatttggagttagctagtaaaaggctgggataggaggggggagaagagcttctccttgaaagaacagcatatataaaagtcctggaagatggagagttggttaaaagattggttacggtggtcatgctaaggagatggggcctctgagtgcagtaggtgatcatggaaaagtttaagcacaagcgtgacatcattggatttatattttagaatgatcactggcaatagtgaggagaatgacttggagaggataatattggaggcagggagaaaagttaagagtctcttgcagactctgaattagagtggtaatagggactaagatattttaaggtgttaagattgacaggacttggtaaatagattggaggtgaacaagaagatggtgtagcagcttctggcattgacgggtgattaggtggatggaaggtttggagagagttgatgtgttagattcgaatatgttgagttgatgactcttgggatataaggagaggtgtttagcagatgtggatttggagtttaggagaccaaggttaggctggaaataaagatttggaaattgttaatttagagatagcgttttgaagttacgagtggatgagatcactcaggaagactgagctgagtgaaaggattactttagacttaggattcagtgatattgttcttcttctgtcatagagtttatctctacttttttttccttttttaaaaattaaatttaaaaaaattttatttttagacagggtcatgctcttccgcccaggctggaggcttgatctgctgggctcaagccatcctcccacctcagcctcctgagtagcctcccaaaatgctgggattacaggaagtaaaataacttttatttttaaacttttaagaacattggctgcattgagtatttggagaagtactctggaatttgattagctatatgttcaaggaatggtattaagaatgagttttcagtaattgttctttttgactgattatgataaacctcatattttatttcactttctaatgtccacaaaagataaaagactttttttataaaaccataaccacagatcatttcttcttttggctagtttatgaattgtcctttagacatggacaattaaactttttttttctttttgacagagtaagttgtagatagataaactttgtttttctctttttgtgcttttaaaaaaattgcttcttatctggaactttagcattcctttttttttttctttttgcttttttgtttaatgttttggatatgttaaaatggatgctaaaaagtatagtctgtttgggtttttagcctcagagttttgtgagtagctcattttccttttccataaatttcacgaagaatgtgtaatatgttttcatgagcctcaccttgaaaatgaatttttatgtacattaatggaatttttgaaagaaaataaaaacattttctttctttctttcttttttttttttttttttttttttttgaggcggagtctctcttttgcccaggctggagcgaagtggcgtgatcttggctcactgcaacctccgcccccacaggttcaagcaattctcctgcctcagcctcctgagtagctggaattacaggcacccaccaccacacctggctaatttttgtatttttagtaaagatggcggttcaccatgctggccaggctggtctcgaactcctgatctcaggtgatccgcccacctcggcctcccaaagtgctgggattacaggcgtgagccactgtgcccagccaaaacattttcttaaacttgcttttgctactgtagtaactttgtaaattttactttaaatcataaaacttaaattttaatcataataatctgttctgaagataatgatcataatgatctgtaagttttgtggaaagttagcagttttactttacatagactaaaggatgcttttgttgtgaaattatttctcttatctgtaactagtagaatattcaagtgaaagtcttccattctgtgtagaaaagaaagggtcgttattattaataggcttctgatggaattttaaaaaatatttaggcaagctgtcattgcaagacctgaataactttttgctgtaacctatttttttctttttaatatttctctgtgtagtttgtaaggaatcattcctagggcttttttttttttttttaagatggagttttactctgctgcgcaggctggagtgcaatgatgcgatcttggctcactacaacctcggccccccggggttcaagtgctattcctgcctcagcctctcaagtagctgggattacaggtgcccaggaccgtgcctggttcatttttatgtttttagtggagatggggttttaccatgttggccggtctggtcttgaactcctgacctcaggtgatctgcccgctgccgcctccccaaagtgttgagattacaggcgtgagccaccgctcctggccacctagggcttttagaacatttgtgtacgtctttttaaaaacttgtttctgtctaaaacttataaatcaggactgaaatatgataaccttaattttcttgtgcactctggaagatgtttatttttaccttaagataggggaatcaggctgggcgcggtggctcacgaatgtaatcctatcactttgggaggccgaggtgggtggatcatgtcaggagattgagaccatcctggctgacacggtgaaagcgcgtctttactaaaaatataaaagattagccaggcatggtggcatgcacctgtagtcccagctactcgggaggctgaggcaggagaatcacttgaacccaggaggcacaggttgccaagactgcgccactgcactccagccctgggcgacagagtgagactctgtctcaaaaaaagaaagaacaacaacaaaaaagattggggaatcctaggagaaaagagtcatcttaatcgcaaatagttgaataatcttcatttgtagccttaaattttattgttacttggaggataatctcttatgatatgctcagggccctagagagttgacactgtcatattccaagttcttaaggatgacttgggtgaatatttaagggcacaattctcagattttatatatgacacggaactggaaagggtgtgttaagattataaaaggaagaggaattcatatcatcatctgttgggcacttacttggtgtcattaactatacttgcataggggatatggagatgagtgtttacccttgaaaaactcaaaatctatgggaggacataaactggaaaatcagtgttttaccacatttcgtgataattgtacaatagaggggtgtaggatacaatttttcaaaaggggtttgaaaggctggaatgaagagctgaaaaacatgaagtttaatggcatgaaacattacgttctacttttaaattaaaaaaattgtattcgaggatgaggtggtttgactttatactgtagccatttatgtgaaaaagatagaataaaggttttagttaacataagcaacaggatgatgtggatgcagccccctccctgctgaaataaaagaataacacataccatacatcccctcttgtccaaataaaacaaacctaaaacgtgaatgacttgttaggttatattggtaaaaataccatgttcatattaagagggatagtaatactgctgtgttggagactagtcacaccatatctagattatttcattcacttctgagtactatggactgcagaatgcttgagaatgatcaggagtgggaaggggtctagctagttgaaggaaaagagtccttttaacacattttaagcattttaagagtcaattttggtataccaagaggacgaaattttagagccattgggcggactttaaagggaactttcaattcctagagcttttcgctaatgtgggcagcttttaaaggttgtgaactcttagaagtgttttagcagaggctgggggcccagtcaagaaagttggagtaaaacttcatatattagatggagttttagacaagaagatctttaagttctgtttttgatactctgttgctgttatttccaaaaacattttcatactatgtgatagtgtctgtagttgttattaccatgtagcattgtgtggacattggcatttgccttttgagtctgagctccactacttgctagctctgttaccttcagtaggttactcctgttactcggaaatagttcagtaccacccctctaggacttttccttaatctctatactaggacccagactgaaggctgtaatttagactctttagtttagaagatgcattcttgtcactttttgttttgttaatacgtgtttcttcttttaggcttttcagctttctctcagatagggtatactgttcattgtctcttgtcttatctgaaacttagatcatctaattgcaaatgcagtgttttgtttgtttttggtaaggggacagttaggaaagaataatcatcttttagaatttaatagacttaaaacttcttaaagccctacttagtatttttaaattctagattttatttgaaaagtgaatgatgattgttctcatgatcaagtacagtactaatttttaaaagacctacctgtttgtagaatattgaacatggcctgtagtttttctttgcagtatttcttggtcctgtctcctgtatttccactgcacagttccttcttaccttacatgtagataaatcctgcgtgttgccatgtcttttagccagaaggtttatttcttagtttttttcttatttcagccatcctattggtggttacttcggtaacttccttaagcactatttcaattacatctttactgcctctaaaatatgcatttattccactgcctgctcatgttatactgtataaattccttgactgtcatttagtgcccccgtcacccatttcctgtccgtgtctcagtgtaacatatactcagctctggctgagcttgtgataagacattgtattagttatgaactctggaatcaggtcagatttgagccctatctccatcatgtagttactgtgtgattttagatgtaatgtcagttttcttatctatacagtgagaataataatgctctgtcttgtaggttcatatgaggattaaataagataatcatgcttactataattagtatgttactggtacattataagtatttaatacatattatgttttgtcatttttagtctgtcaacccatgtaaatgacgctaaaaattatgattgaaaacatttttaatatagaaagatttcactaactgtatgtattgtatttccccaactgtagaagagtagaagaatgagaagaaaatttcatttaatacagttacaatgttgaattttgaaattttaaggaatctttgagaacctctagttaatccctctttttttttttttttcaaagtgagaaaacagaacctgtaagattgtaatttggtaaattagtggccaagtcagtaccagaatccaaattctgtatttgccagtaccattatattgtattgcacatttattcagcatattttaggtattcagtaacttttgagaattgaattaatacgatgattacgcatgtttctgaagactagtttatttctatgtgttcattgttcctgtcttctcttcctatacatactcatttagggcctgtgcattgatccaaaaagcatttattgaacatctgtgtgcagagcagcctttttcttaaataagagccatattttcccacctctgcataagaagtctggcaatgtgttagaaatttgcactctaaattttaaaattaaactaagccctttaaaattttttttccttttttctttttgagacagtgtctcactctgttgcctagactggagtccagtggtgtgatcacagcttaccacagcctcgaactcctgggctcaagggatcctcctgcttcagtctcctgagttcctgggtctgtaggtgtgtgccaccaatgggcctggctaattattttttattttttatttttagtagagatgaggtattgctgtattgcccaggctggtctcaaactcctgggctcaagtgttcctcctgcctcagcctcccacagtgctgggattacaggtgtgagccaccacacctggcctaaactttttaggaaaaatattgtactccaatgttataacattctgagttggatttgttatttatttttttgagacagagtttcgctgttgttgcccaggctggagtacaatggtgcgatctcagctccctgcaaccttcacctcctgggctcaagcgattctcctgcctcagcctcccgagtagctaggattacaggcatgcaccaccatgcccggctaattttgtatttttagtagagatggggtttcaccatgttggtcaggctggtctcaaactcctgacctcaagtggtctgcctgtctcagcctcctaaagtgctgggattacaggcctgagccactgcgcctggctggatttgttatttttaatgttcaggttatcgtccagaaggagctttttgaaggatagaagtttcatgaaatgtggtagtatataaataaggatgatgtttaaattatctatcaaaaattaaagccatggtgtaccatttcaacagtgtttatactttgtttaaagaagaatgggatctctatttatgtataattgcaatattttgtcattttgtgggacctcaatgcagtcaataagatggacctggagaggtggaagataattaactagaggagtaggcactacaggtcattttccggttgtcttatgctgcaaaatagataaaagttgagaaattgggtgaaacaagattatggagaagtatgtaaccaacctgatttgctgctttgaatagaaactgtctaactaggttttctggttgaatggggcattgttgacagattgctaatagctgcttattaacaatttgtaatgagaagatttagaaatcatccaaaagtaagccccattgaatgaagaatctgactttgaaaataataaaatacttttgttgttgtgtgcaagctttaatgtgtgcagttacagaatttgtgattatgcatttgcttttgtggatgaaaggcaaaagtataaatgaaatattatgacattattaaatccctattttgtctgtctttggaattcattctggtttacaattcgttataaattgataccagataaagactcataatatagtctgcttaatgactaatcctgtaaaccactgcagtgggatgtgtgaacaagagtaattatgttgttcaacaagaagtacctaattcttatccacagtgtagatataaccttcaataatggaaggtcacagctaatgagacaataaaactggcactttctgtttagttgcaaaagcctgtttgcttgttgacgttgtttgagtattgtctgtatttatctttctcagaacatggcccctgcctctgtgtagttgggacagagtttgcgtacatatatatctgtgtttttgtaaagttttacatatctgaaaaggggattgaataaaatgttattgtcttgaatgtattgaacctcccattctgcactactctgcccttagaacactagaagccagccttataccaccaaagcaggagattgggttgttcctctctgtcaaaagtgatcagacaaaaggaagcaaagggaatccaaacaaaatagccaggttattgcccagtcattctagatgaagtaccctggtctgctcactcacatagattttcccatcatctttttagtatcttactcttaactatgtatgcacagcccaggattgtctctcatttaaggaaagcttcaggcatgaaaggcagataccagtgtagggagaagaagaaaacaacatcaacacccaatttatattctcaaaaaagaaaaataacaaaatgtagaggaaaaagaaaagagaaatgcagaaaattaaaagagttcatggaaattaaaaatttaatgtaagcgttaggagataaaattgaggaaaatcccagaagatagagccaaaagacaagagatgtaaaaatgcacaaggaaaaagaaaatagagtaaaggaaaaatgagattatcagtctaggaagacctgtgtctgaataataagtgtataagaaagagaacacaaagacatggaaggaagattattgtaagaaaacttcccagaactgaaggggacatacatctctaagtttaaaaggatcgacagttatcagtttatgcaattaaaaaaaaaaaagaccaaccccaaggcacaacattgtaaaatttcagaacagattaagagaagctgctatgattccagatggggatatatagttgactatgaaggattatgggtcagattggtactaggcttcttaacactggaagccagaaaacaataaggaaaggccttcaaaatcttgacacaacatgatttcctgcccagcactctgtactgagccaaactcagtcgtaagggtaaatgaagattttaaaaatacaatgcaaggaataaaaacatcgtacctcacatgccccctttctcagaaagctgctagaggaaataccccactaaaaagagaaaaccaagaaaggggaagtagtggcataaggaaacgggatccagtataaaagagagacaagggaattcctgggataagctaaagggaaattccatgaccataattgtgcaccaggcttggagagcctacagtccaaattggaatatggtggagggctacaggaaagaaaactgatttacctgatgtatttgaatatattgagaagaaagttaatacttttagctgtttgcagatgaattagcagtaggtacctagaaacctaagcaaatggaaaaatggtgtagttattaactgtaaggaaagcaaagttatacagaaaagagtaatcatgatgtacttttggctcagctgtgaatattatttacagccatagtaataatgtaagtactgacaattgattcaaccaaaaattatgatagaaagatgagggagagaagatgtaacagagctaaaccattatattttataataggaagtcagtagagtcctcaaagaaaaaattaaacagctgcatagacctactacatagaatatagagaaaaaaatgccagaagaactagctaaaaagacttgaaagtggttgcctcggggatttgaaaattgtggggtatgttaaagggggaagggactgctgtttttcttgtaaaactttttggttttttaaattgtgttcacgtctgtcagattatgaaaattagttttaagaggttgctccttacagaatgctcttgcattcaaaatatatacagttctgaggcattctaaatcccctaggattctgagatctctatcaattgaggacgtagagtcagcagaatgctacaaaattgctgaggaagtaatgatttctaatagtagtagtggttgatgcaatccttagttgtaaatatttattttgttgtagtgctaacaaatggagatttttaaacaccttaaatgcagattaaaatatatttcatttcaacaactcagatgtgttagtgtttagttttcctcagtgttgtcaacacttttcattgtgaattgactgctttatgcttctttgcagcttttctgttgaaagatgcttcagtgtttcccgcccccttcttttatttcattttaaaaaatactgcatgcttatcacagtccttaagagtatgcaacagctgttccaataatagcaatagatagcacctgatttttcattatacctgattataagttgcaatggttaatttgaatccacattcttttcttatcttaatcgccagtttttaaaagccaaaatgttgaagcttgaaatggagattgagttaaataaattaatcttcaaataggtttttctgttatccaattaaaggcatgtggttcgtttcctcttaatgtcaacatattatagcatgaaagaaagtacatttggagtagaaccagttgcatgacattcaacacgtttcttaaccttgctaagtcttattttcccacctgaaaagtgagaacagtacctgcctgataattatgacaattgatgatgaatcctgtaaaaaaaaaaaaaaacacccagttactcaggaggccgaggcaggatcacttgagcctaggtgtttgagaacagtctgggcaacatagcaagaccctatctcttaaataacaaacaaaactaaaaagcttggcttgctgatagcagctactatttgagtacctactatgtaccaagtattgttattgctgctgctactctttgtttcagagagagacaaaaaatgtaattgagggcgctcaagtttattgttgtgtcataaacttttttggaccatcaagcaagagattttatgagaaatgtcaacatattcttctacaaaaataggaaaatgatacatctgcattgcatctgaatctttgtacctatggaataaagacaaaagctgtcatcaatgcagagtttacagtagtcactgaattttgctggtttgtttttgatttaggagaatggagttgaaatagttctcttcaaaatttgtactttttttttctgtaaaatgcagtacatttgacccatgccaacttaaatttatttttaacctctaatccttgaagtttcatgttatttatttaaaagcagtttacttattaatagtacatttcagtttgaagtccctgttcctttttaaataataaaagtctttagaagtattttgtactcttttggtgagtagggagaaattgatatcctgctgatattatagttagtaattgtttacaatctttgataacattaaaaagagaaaacatttctaagatttgggtggaatttgttaaggtttacgttatatctttgcatgcctctacagaacatgaatttgagcatttatttggataagttatcgctgtagatgctacctcccaccctttcttctggtgtcctttcttacttgtttatttgttcgttcattcattcactcattgattatgcaggcatttgaagagtttccactgttgtcaggccctagttgtagatgctgagggtaatatggttgtgtaccatggagaaccctggtttgcttatagaatcacttgtgtaaacagaaaattacaataaagcaaaataaatgctaaaatacagatgcgaaaagtggcctttgtaaaaatagtgagagtaaagatcatcctaccaaggctaatggccaaaggctaacaaaagctggaccttgaggaaagagttttccaagccagagaagtaaaggaaggactcatatttctttgattaaccagctatattgcttataaagctctttatatacttttctcctcagtattttattttttgcttaatggttttgccacctgcaaagaacccttagagaattggctggggttatcattgtgagtggtggtgagttagggaaggcagcataagcatagcttttgtgtatttggtatgaggtgaaggaattagttggagaaatagagagcaaatggtaagcttacatgtgtctttttatcctaatactccctgtcagtggtgatgcaatcttttaggattctgctaatagctgtgtgatcttgggtaagtgatttcttctctttggattccattttccaccactttaaaatgggaggattggtatagatggtcatttcctattagtaggtggggaaaaaggagaaagggggactaaataagtttgcgaacataggtaaacaaagttaaatagattactgcagcctcatgcattatggcatatgaattgggttgctggacttctagcttggccttgcaagttaagtgagagtcagtaatatgagtccagctctgtctttttcctaatggtttagtggaaagagcatgggctttagaatcagacatatctgggtttgaatcctgactactccttagtagctttatggctttataagttatctaacctttctgaacttgtctcctcatgtataaatcaggcaggataataccttgcggagttgtaaagataatgacattccatgtgaaaatatcaaatagaatatctgatatataattggtcaaaaaaggtgtaacttaagtctacaaattccagagttagtacagaatgtaagtaacacttgataatagctattgatatcctgcctacatctggtgtttgagatggactgtttgttgtttcatatatacttataattcttccccaagaaaacaaaatattcttgagagcacatcattacgttttgccatctacatagcactcgacattctcctggagactcagtaagtgcttgataaatacctgacagtttcatcaaaacagtggaataaagtgaggtgtggttttccctggtgtatactttatcctatatttcttataaccaagggtagaagtcaatgaatttatgaatattaattttaaatttctttggttacttaacgttaaatgattaaatttgaagtttgaaataataggattataagtgagctggcctttatttgcttaagtaaaccataagaagggggttataataaagtgtcatttaatagtgtaaattatattattggaatactaatgttttacattttgttttttctctaagcaaatggttatgagccttagagtttctgaactccaagtactgttgggctacgccgggagaaacaagcacggacgcaaacacgaacttctcacaaaagccctgcatttgctaaaggctggctgtagtcctgctgtgcaaatgaaaattaaggaactctataggcggcggttcccacagaaaatcatgacgcctgcagacttgtccatccccaacgtacattcaagtcctatgccagcaactttgtctccatctaccattccacaactcacttacgatggtcaccctgcatcatcgccattactccctgtttctcttctgggacctaaacatgaactggaactcccacatcttacatcagctcttcacccagtccatccggatataaaacttcaaaaattaccattttatgatttactggatgaactgataaaacccaccagtctaggtaagattattgtatgatagtatttggttacttttgcaggatgaattttcgttttaggcttttactttgacccagtttattattcataatgaaattttcatttgatagtaacagctggataataatgaagatctttcaaatttagataaaatcaaatatataaaagctgtctttcaggaaaaaaggtagtatagtgatggttactgacaaagtaaatattaaaaagtttcaagaatataaacttccaaagagtagtattttagaaggttgattaatattttataatatctcataaattaaattaaaaccaaatgaatcactacaagtctctgattagttcttaattttcaggggttgatgatctctaaaacaaatcactgactagttttgattatttaaatgagtgaatggttttaatgatcataaaaggagacttgagctttgatgtatgctagttaaatttcagctgatttttttcaagtggagaagtgcatgctttacaggcatgcacatgcacatgcacactcatgattacggttatataatataagtgcttgaaatttattttactgtgttgttccatcatttgatttgtagtctagcatatagaattcaatatattaatcaacttgtaattttaattgctataatgctaccttatttatttaacgtagaataaaactcaactgttgtgacctctgatgcctttggtataatatatttaaaatatcagacttctaaatgctggtttgttggcatactacggctggcaagctaagtccagtctgtggcctgtttttatgtggttctgagctaagaaatctgaaaaatattcccaaagagttattaacaaaaaaggaaagaaacaaaaacaaagaatgtgtaacggagaccatgtgtgcctgtaaagcacaaaatatttacccgtatagtaaaagcttgtgaatccctgttacagatcattgaacatttcagtttgggggactggcaagtgttgagaacattttttgcgaatttttgagaacattttgaaaatgtttactgaaattctatctttgaaatatgaagtgtttgtttttaattatatttagcagaaattatctgaatacacgaagattataggagtcattttcaaacaacgtgagttttgtatcacattattttattttttaagtggccataataagaaaacattttttgagaatctactgtatgcttataaaactgacacatgctcattgtaaaaaatggaattgccaaagttccttccttgttagctgtttagtgtgtatgcatatatagtataagcaaattgtttcttgttttttacagaaggaatcatatacatagtattgtataacttcccttttttccccttaataatatatcataagcatcttttcttgtctgtctgattatgtgtgtgtatatatatatatatatatatatatatatatatatatatatatatcccattttaaattaaaggccatatctgtatctatccatatctctgtatatggtctgtgtacatgtatgtatgtgtacatatgtgttatgtattgatcagttgatgaaaacgttgtgaccaggggcttgcaggaacctaaccctatacttcccctggtagcagtgattatatattcgcaaattcagtgtttgtggtgattttatgaacataaatgtcacaaatagcaataattgactatatttgaagtatgatttgaatgccagttttcatgaataaatctgctgtttgtggtatgtattcacagaaagtcaccaaatgaataggtggtatagaattgcttagtgatatgtaaatagattttcagtatctcatcgttatagaattaaaaacaaaccaatttaatatgcataaaaagatctcaccacaaagtaatttgtggaagtttattggctcaataaatatttgttgaagggcaatgcttattgaatgtgaaaaatatttattgaaaaaagattttatgtaattagtcttcagggtgtaggatgagtatattttaaggctctgtttttataaattctttaacattattaagactttttctgtacttcattaaatgaagtggctacatttgtcacataacttagtttcctaaatgattatttttgccggtagttcatttgttttaaatctaagaaaaccacgttttctggaaaattaaatagcttccagcattctcttcatttctaaacgtacatacatttaaaatcaagtttttgagaacatagtttcgaacaccagctggctagttgatcacaactatcactgagtccagaatgggacaggcacatttactttttcattttttcccttccattgtggccttaagcactagatttaaacagattttaagatgttcaaatgtaaactgaatgtttttatgcatggttttgtatttctaactaaaatggaagacagtagttctgataattcccattttattaggtaattctcattcattcttacgatcattttgttatttctttaaaacaatttaaaataattttaaggcctttattttggagccataattaaagtattcttttcattgtccataattaactgtaagaattgagaggtgaagtaaaaggtggttgtaaagtaagatgtttaatttattgtttactttggcctctcattatctcaattctgtttgtttctatgaggcttatttcaaatgctttttttctttaacctttttcatttatctttctaggctgtcctcctttcatctgtacatttcttccccagccagaatcaatttcactttccctgcatgctctcataacatttattttttatttttatttttttgagacagagccccattctgtagcccaggctggagtgcagtggcacaatctaggctcactgcaacctccgccccactgggttcaagtgattttcatgcttcatcctcccaagtggctgagacttacaggcacgtgccaccatgcccgactaattttgtatttttagtagagatagggtttcaccatgttggccagggtggtcttgagctcctgacctcagttgatccgcccacctcggcctcccaaagtgctgggattacaggtgtgagccactgcacccggcctcataacatttattttttaaattttattttattttattatttgagacagggtcttgctctgttgcccaggctggagtgcactggcacaatctcagctcactgcaacctctgtctttccggctgaagcagttctgccacctcagcctccccagtagctcagactacagacacgtgccaccatgactggctaattttagtatttttagtagagtcagggtctcatcatgtcagccaggctggtctcgaactcctggactcaagtgatcttcccaccttggcctcccaaagtgctaggattacaggcgtcagccaccacacccaacttaaattgtatttaataataataataattattattattttttgagacagggtttcgctctgtcatccaggctggaatgtggcggcgagatcttggtttgctgtggccttaacctccccggctcatgcaattttcccaactcagcctcccaagtagttgagaccacaggcatgcaccaccacacctggctgatttttgtttttatgttttgtagagttgaggtctcattatgttgcccaggctgtcctaacatttaatttaccctttattaaatgtttttgttttgttcctcaaaatgataaggcttttgaggcatttatctataaatccctataatagctagatatgaacctgttacatggtagttcagtaaacatttattagctctccaactcgttttaatgcagtagatggaatcttttatttcattttaattcagtggattttaaccattttaccttgcaaacacaactgagccataccacactctgtaattacaaacagtggctatgatagggatgggaaatagagtagggaagaatggtattcttcctcttattgccctatcctgtcatctctgaggttaattgatgtctttgaaatttaatatactccatttaaaaaaaattttccctaattacaaaaatgttatgtttaatgtagaatccatagaaattataattacttgcttactttacagataaacttttaaaatacttctgtggtattctttttgttagtcatttacgggtgtgtgtgtgtgtgtgtgtgtgtgtgtgtgtgtgtgtgtgtgtatttctggtttcattttgaaggagaggagaacctcactagctcacgtaacctggcagccgcatgtattattgatccatataaataatggaagaaaattttaatcttgataggatgttgagcacatgtgttaaggggtactttgtttgaaataccttattgcttagtgtgccaatattggtgttgatgaggtgtgaaatttacataattatgaaaataaaaggaaaaataattttggattaaaatatcttgtccattcagggacaagataattatttgatatttcctctcaatcctttaatattgttttgtttagaataatacctgtatcattcaaaatagtttataatattgtttatagttattgtttaaattggctttgttagaacataatggcaaaaacacagaatactttcatggtaaataaaataatagttctttaggatacagtatttgatttgattcagacttaagtataaacaaatctattaatagatttatatttgttactagtttagctatttatatcttccttgactcaggtaaattttcaaatagaaaatacatttttaacatagtgcttttaaatatttttaatatttttaattatttcaaaggccaacatgtatagaacagagagctttgcattcatttggactacagatactcctctggttatgtcccaataaatccatcataaattgaaaatatccaaagtcagaaatgcacttaatacacttaacctaccaaacatgataggttagcttaacctaccttaaatgtgtctaaaacacttacattagctgacataacatctaacacaagtcctgttttataattaagtattgaatagctcatgtaatttattgaatatcgtactgaagtgaaaaacagaatggttttgttaccaacagaatggttgtgtaggtactcgaagtaatttctactgaatacctattgttttcttaccaccgtgaagttggaaaattgttaagtcgagccatctgtagtcatataaaagtatggtgactcatcttgtttgctttatatgagattgaagtcaaattttaccttctcaggggatgtcttttcaagtttttaaatatctcaggcaatatatctgaataagttcacatcatatgtctttattgattagagatttctcattgattggtatgaggcataataattattgactatgagtgttacttattttttttctttttttttccgagatggtctcgctgtattgcccaggctggagtgcagtggcacattcttggctcactgcaacctccgcttcctggctcaagcgatcctcccacctcgcctcctgagtagctgggacgacaggcaggagcaaccatgcctggctcatttttgcattttttgtagagacggagttttgtcatgttggccaggcttgtcttgaacttctgatctcaaagcagtccgctcacctcagcctctcaaagtgctaggattacaggtgtgagccaccgcacccagctgactatgagtgttatttctaatgttctaattcaatgttcttctacttgattactgaaggatagaatatctccttgctgtggtctgaatgtgtccctcacaaattcaaatgttgaaacctaattcccaatgcaatagtgttaagaggtggggcctttagcaggtgattaggtaatgagggcgtggcccttatggatgagattaatgcctcttataaaagaggctccaaggagcttgtttgccccctttcatttgccccctttcaccctgtgaggacacagctaaaaggtgctgtctatgaggaataggcctcaccagacacaaaatctgcagatgccttgatcttggacttcccagcttccagaactgtgagaaataaatttctgttgtttataaattatccagtctgaggtattttgttatagctgcccaaatggattaagatactccttttagccaatctagttgaaaccagtagtgaattgataaaaagtgatacataagttaaacatcttactttaatgtatatttatttgccaatcttttgatgttggtcaaggccttttctttgacagtgatgacttcgcagttttagattattttagcaagaagacttaaaggcttttatgaagatatttgagtatagaatctgttgcgaatggggaaaaatcttttatagttggcttcattggcattttttaaatagcaacttggctttatcaggtctttcccagagcatttaacttagttttcatgaaaacagcaactttctttttagacttacattttagcagcttttgtaatatttaattcagttttgtaattacaattacaagtgcaactaacataagcaagtttgagaataaacctctggttcttggtaagcataccacatggtgtgagcagaattgtgcggaagcactgtagagttgtctactggccacaggcagttagcttggtagggcattggtctggatgttctataaagggaatggagagcatcagttaatcataatatcagttaagagggcttctactgaatttcttttgcgccattcttcttaaactccccaaaggcattgaaattagaagttcattttcttgcctgagaataatttaagtggtttattttgtgggggaacaacatggatcataattgtggttgagttttaaaagaaatcatttagctccctttacccctttgagagggttataatggggggaaggattgggaaaagtagagaagcaaattatgttttttatcatacagttgtatgttttcttttctcatcaagcacagtgacagtaaataatgagtataaaaatgaaataatttcctagtcatttttccttgtctgttttttcaccaaaaattatttaaaattttgaaattatctgtaaagatcactgccttttcttggtcctcctaaattctgaaagtatcctaatattgtttagaaagtgtttggacgctacagactgaagaatctgaaacattgagaaacacttaaattgaccacatgggtgtccttcaatttgtgattaaacaaactgtgttttatttttttcatttttaagcctgggaaggtggcttctatttaaattttgatgtttatgaaacaatcttttccattaaacaccaagaatgtctattttctgggctatatatatatttgaattttcctgtgcttttttaaaggtacagttgttcttacttgacatgggatagtataccaataattctggagaagaccggcaacctagatgtgctgggcgtatagtcttagtatttaagaaaactagattgaccctttttcctatttaaagtagaatatttctttggagatatttacacctcttttaggcttgagaagatgtagaaataatttatagaaaatatttgaaatatatatatatttatataaacttgggttttgctctaggcaaaaagggaacagatgctttaacactcctaaatagttaaaatgatccatcaggttttgtgcagtgtgggtaaggtttctgctacatcttaataacattggttaccagtgttttctgccaagggctcctctgacattggattatatttcacagttttcttcttttctcattttttataattgagttttcctttttccacattcttaatatccagtgcctggagatcaggtgatacaaattcaaggacgcaggctctgataactattagaaagggcattcaaaggttttatgattcattctactctacttttagataattcagcataaactgtgctcctctatacttgaattttgggaaatcaagagcactaatttttctgtaggtgggtttctttggaaatttttctccctaattggcagcactggtttctgaccttcaaaatgaagtctaacacttacctgctaagtcgtacattcctttatagataatattctgtctttttatctggtgattttaatgtaatagtcgtgtttgtatagttgtccagaattccccaaggcatccagtatttttgataaatggatgtctgtgtacttgagtgtgatcttgggaactaagaatgattggcttttttgggtttggaaaggaatcttaaccattagaatcagtgaaagaaccactctatacaattataattatgaaataattttttttaattgagagattaaggagccaaacacttagggtcagaagtaagtacagtttatcaaagaaatccaacatttaagatcttactgggatcgaatttaaagatcagacatctagtataatactgtatagtgtttgaaatgcagcatttcagaatttaacagcgaattctgccgtgcttcgctcagcctcctgtgcacaaattgggttgccatgagtttgcatggcagccagctggaggacttggttgtggtaatcatggggcatgtggtcatcatggggtagataggataatgtaacaaaagggagaatctaattttggcgatcatttctttctttcttttaaaaaaaagacgttttgttgacacatagctgggtgtttggaaaataattttaagacattcttttttttttttttttttctggagatggagtctcgctctgtcacccaggttggagtgcagtggcatgatctcggctcactgcaacttctgcctcccgggttcaagcaattctcctgcctcagcctcccaagtagctgggactacaggtgcccactgccacgcctggctcattttttgtattttcgtagagacagggtttcatcatgttgcccaggctggtcccaaaatcttgagctcaggcagtctgcccacctcggcctcccaaagtgctgggattacaagcgtgagccaccacgcctggcccattctttttcttcattcctgacagtgcttgcagcagaccccaatagctctgggcagagattagttattgtaattctttggcactactcttggctaaatttattaaaactgaaatgtaaataagctttagatgtgccaaagatggagatattacagtacaaaagaaaccgaatgttggatgtagtattataattaaatcactttaagataggtaaaaataaaaagcctgaattgttgaaaaaacaaataaattagtttattatctctatatgtcctttcaagataatctgcagttcctagaattttatttaaatgtttattttgaaactatatgtttgaataaaaactgaagactgtcctttttccattgtgtggttttgacagccttgtcagagatcatttggctatgtatgtgtgagggtttgtttctgggctcactattctgttccattggtctgtatgtctttatgtcaagaccacactgttttgattactgtagctttgtaatacgttttgaaataaggaagtgtgaggcttgcagttttgttctttttcaagattgtttttgcttttgggagtcccttgagattttatatcaactttaggattttttttttttttactatttttgcaaaagataccattgagattttgataaagattacattaaatctgtagattgctttgagtattatggacatttaaacaatattgtttttgattcatgagcattatccttttttttatatttttaatttctttcagaaatgttttgtagttttcagtgtacatgtcttttgcctctttggtcaagtttattcctaagtattttatccttcttgatgctactgaaaattgaattgttaagttccttttcagtgtgttcattgtttgtgtatggaaacaggactcattttttgtgtgtcgattttgtatcctgcagttttcctgtttgtttcttagttctaatattttttttcttttgcatgaaacttttagagttttctacatacgtcatgtcatctgtgaacagagattaattttacttctttttaaatttgaatgcctttcatttttttgtgtgtgtgtaattgctctggctagtacttctagtactatgttgagtagaagtggcaagaattgccttgttcctgatcttagaggaaaagctttcagtcattcaccattgaatgtgatgttagtggtgggtttttcatatatggtcttcattatgttgagatagtttccttccattcctagttgagtgttttttatcatgaaatgttgttgaaacttgtcaaatgtcttttctacatccattcagatgatcatgtagtttttttcattctgttaatgtggtgtattatattgaatttcatacactgaaccatccttgcattccaggaataaaccccacttgatcattatgtaaaacccttttcatatgctattgaatttgaagtgtagatattcttttcttgttccttaagaaaagcatcttgtctttcaccattaagtataatgttagctgtggattctttcatagatgcccttcctgttgagttttttaattataaaagcatgttgtaattaattaattaatttatttatttatttttgagacggagttttactcttgtcacccaggctggagtgcaatggcatgatctcagttcactgcaacctctgcctcctcagttcaagtgattcttctgcctcagcctcccaagtagctgggactacaggcacgcaccaccacgcccatctaatttttgtatttttattaaatgcggggtttccccacattggccaggctggtgtcgaactcctgagctcaggtgatctacctgcctcggcctcccaaagtgctgggattacaggtgtgagccaccgtgcccagcctgcatgttgtaatttattaaatgctttttcaacatctgatgagatgattgtatagtttttcccattattctattaatatggtgtctaacactgattgcttttcatatattaaaccagtagctgttggattttgtctgattccagatgacctatgctacctcctagaggagtaaataacattttccacttctgacatttgtggggttttttaatcaattctgaattttatttttgtttacatgagtatagggctctaattttatttttttcccaaaacttcctttgaatattattctagatcttactctgttccactggtctaattgtatacttttctgctaacatggaattattgtatagttgacccttgaacaacaaggggattgggatgccacctttgcaacacacacagtcaaaaattcacatgtaacttttgactcctccaaaactttactataacctattgtttaccagaagccttaccaataacataaacagttgattaacacgtattttgtatatgtatgtattgtgtactgtattcttacagcaaagtaagctagagaaaagaaactgttactaagaaaatcataaggaaagaaaatatatttactattaagtggatcattataaaggttttcatacttgttatgtttgcattaagtaggctaaaggggaggagtaataggaggattttcatcttgctgtctaagaggtgacagaggtggaagaaaatctgtgtataaatggacccacacagttaaaatctgtgttgttcaagggtcaattgtacttaattttttgattgtttttaaatttttaaatagataatacattgatgtacaaaactcaaaagttacaaaagggtttgcaatgaaaaggaagtccctctttcacccttatttcagtcacaggtgttgctttcagttctttttatatttttactggggtagctgctgcacctacaaacaaacatatttgcctcattcttttttagcagctacttagtaggcaattgattcgttggattctgtgttattaaatattcccctgttggtcaacatttgggtagtttcttgctgttgaaaacattgctgtagagaatattctgtgatatatatcactatgcacttgtctaaatatagccagtagttttataattcctagaaatagaaagtgcatctaaatattttttgtagatgttgccaaatttccctctagagaaaggtgtgtttgctaatttataatcttacaggctctgtaagagactgttttttcctcctgtgccttcaacgataccatgtgttattaaactttttgatcattccaaattaacagcgaaaatttataactcattatagttttaacttgcacttctcttatgggtgagggtgaagtttgttgttgttgttgttgttgtttttaaaaatatattttttaaattataaaagcacatcgttatttatttatgagcggagttttactctcgtcactcaggctgggtgactatatatgtatatatatttcttttttttttttttactcttcaaagttccttgagctttttattttgaaatttggtggttgggctttttacccttttttatagacttaagaaatttagcactttgtgatataagttgtgactactttttccattgtgattgtcttttgagttttttttatgattggtgttgcacattagccatcagttcttttttattgctaagtaatgattcatggtatggatatatcacaatttctctaactattcgaattatttaagagcattttggttgtttacagtttctggctatcataaataatgttatcctgagtattcatgtacaggtgcttgtatggacataagttttcttttctccaaatacatgcccaggaatggaattgctgggtcatatgtgtaagtatatgggtttttgggggttttttttttgggagaaaataccaagttgtcttcctgagtggctgtaccactttctgtttcttctggtattgtatgagaggtccagtttttctctgtctttgccagcatatttgttattgtcactttttttatttttagatgtttaagtatgtatgtagcgataactcattttggttttaatttacattttcctaatgactaatgatgttgaacatctttccacatacttatttgccatctgtcgacatacttatactctttggtgaaatgtctgtgcatatttttctcattctttaattgaattacttgtttttatattattgacttttgagagttcctttgcatattgtagatactagttttagtcagagatgtagtttgcaaatgttttcttccagtctgtagcttgtatttcttcgggaaaaaaaaaaaaaacaccttttgatcttgaaataattacagatttgtaggaagttgagaaatgtataggaacatcctgtgtactcttaacctagccttctccattgttaacatctttcttaatatagtgcagtatccaaactaggacataacattggtacaatacacagagcttttcagattttattagttgtatttgcagtcatgtgtatttgtagctctgtgcagatttatcacatgtaactaccaccacaataaaagatacctaactgtcctgtcacccacaagactccctcttgctaactttttgataacctcacccactctctctagccccagtggttcatccaagttgctgtgtatatcactagtttgttccttttaaggggcggggaggggggcgctgagaagtattctatcatataatgtagtttcatttgtttaaacatttaccagctgaagaacattagtgtagttttctgtgtttggctgttaatgaataaaattactatgaatattcatatacaatttcctgtgcaaaaataaatttttatatctctggtaaatgcccaagggttatcagttgctgggctgtatggtagttttagttttagttttaaaaggtctgcaaaattattttccagactgactgtatcattttacattcctagcagccatgaatgaatgatccagtgtttctgcatccttgtcagcatttgatgctatcactattttttagttttgccattttgataggagtatagtgatatctcattgtgttttgttgttgtttttgttttgttttttttttttgagataaggtctcgctctgtcacccagggtggagggcagtggcatgatcatggttccctgcagcctcaacctccctggctcaggtgatcctcccgcctctcaagcctcccaggtagtcaggactacaggcacacgccaccacacctggctaattctttgtattttctgtagagacagggtttcaccatgttggccaggctggtctcaaactcctggagtcaagtgatcttctcccctcaacctcccaaagtgctaggattacaggtgtgagccaccgtggctggccttcatggtggttttagtttgcatttccctaatagctaatgatgttgaacatccttttatttgtttatttgccatctgaatatcctcttcagtgaaatatctttttatgtcttttgtcttttctaattgcagtgtttttttttttttttaacttatgagttttcagagttctttctagattctagattctagtccttcgttgggtttgtggtttgcagatcttttctcctgtggtgtaacttgtctttttttttgtttgtttccttgtttgtttttgacatgggatctcactgtgttgctcaggctgcagtgcagtggctgttcacaagagtgattatagtttaccttaatctcaaattcctgggctcgagcagccctcctgcctcagcctcctgagtagctgggactacagatgcatgccactgcgcctggcttgtcttcttaataggatctttttacatagaacaaaatgtttaattttgaggaagtctcatttactgatttgtttctttgttagatttgtgttttaggtttctagtctaacaaccccacttgcacacccaccccacttttttgacttgctctgtcacccaggctggaatgcagtggcatgtgatcatagctcactgcagccttgaactgctgggctcaggcaatcctcctgcctcagccttctgagtagttgagactacaggtgtgtgccatcgcgcccaactaatttattttttactttttgtagagacgggatctggtctcatactcctggcctcaagtgatcctcccaccccagcctaccaaaacactgagattatgggcgtgagccacagtgcctagccaagtcaaaaacctctctgcctgactttagatttggagatttttttttcctcgaaagtttttatttttacattttacatttaaatctgtgatccatttgttactactttttataaggtgtgagattgagattgagcttcatttatggagatctaactgttcttagacccctgttgcaaaggccgtcctcctccattgaattacttttgcatctttatcaacaatcattgtctgtacctatgtgggtctctttctgggtcctctgttctgttccattgatcagtgtttctgtctcccaccattaccacatggtcttgattactatgtcagactatgtaataagtcataaaattaggtagagtaattgcttttactttgtttaaatattcttctagttcttttgcctttccacacaaattttagaattatcttctcgctctacaaatagtcttgctgggattttgataggaattgcattaaacctgcatatcaatttagggatgattaataatttttctattttgagccttccagtatatgaacatggtatgttgccatttgtttagatcttttttaaaattttattcatcagcattttatagttttcagtatatagttcccacacttgttttgttagacctgtacttaaatattttgtttttttctgagtgattatatcttgtgaccttgctgagttcacttatagttctaggaagttttttgtaaatttgaggggtatttcttcatagactaccttgttttctgcaaacagggacagtttttatttcttaaccatctgcctgctgccttccatttatttactttgccttattgctttatggctctaatagagtgttgaataatagtggtgacagtgaacatccttctttgatttttatttcttttttttttgagacagggtctcattctgttgcccaggctggagtatagtagcacagtctcggctcactgcaacatccgcctcctggactcaagtgatcttcctgcctcagccttctgagtagctgggactataggtgcgcaccaccacacccagataattttcgtattttagtagagatggggtttcactatgttggctaggctggtctcgaactcctggcctcaagtgatctgcccgcctcgcccacccaaagagctaggattacaggtgtgagccactctgcctgacccttctttgattttgatcttagggggaaagcttcaagataaaatgatattttttttttctgtgtttaggcttttgcccttgaatctaccatgttttgtattattatccttttttttttttaagcttttcgttagcatttgtctgacataaactttgttcttttgttttcaaccttttgtggtgtttatttttgggttctttttgattttttgttttaaaatagctttattgacatataattcatataccacaaaatatattcctttaaagtgtacaattcattggttttactatatccacagagttgtgcagccaccatcactatcaattttagaacattttcatcacccagaaaagagcctctctacccattatcaatcactctttagtgccacctctcccatcccctgaaactactaatacggcatctgtctttatagattttcctgttttggacatctcatatgaatggaatcgtatggtatatgaccttccgtgactggctgttttcatttagaatgatgttttcaagttcataaagttgtatgtgccgaaactttgttctttttaatggccaagtaatattccgttatatggatataccacattttgtttatacattcatcagttgatgggcatctgagttgtttccactttttggctaatatgaatattcgtgtataattttttgtgtggaaatatgttttcaattcttttggttaaatacctagaactagaaatgctggctcatatggtaactttgtttaacctttgaagaactgccagactgttttctaaagcagctgtaccatttatattcccaccagtgatttatgaggattcgcatttctctccacatccttaccaacacttgttattatatgccttttttaatatagtcatcctagtgggtgtgaagtgacatctcattgtagtagatttctctcttacaaatagcatgtacctggctttttaaaaactcagtcttaaaatttaacttactctcattttatgctaacgttgttacatttggtctttgttctgccatcttaatttgttgtctgtcatttttttctgacctctgtgatatgaattatactttgtttctcttttattttctaatggtttgggagttctgccttctatttctgtaggtagttactattgaaattttacccaacacatttaagcctaaattttactaccaacatcaacaacttttaagagtaattactgtgtcttgcctcttctcctcttcactaatttattctatcagacatgtattcatagttgtttcttcaaaattcatattaaccacagagagacaaatatttcgtgttctcacttatatgtgggagctaaaaacaattgatctcatggaggtagtgatgatggtggttaccagagggagactgtagttaataagaatttattatgtatttcaaaatagccagaagagaagatatgatgtgttcctagcacaaagaaatgataaatgtttgaggtgatggatatcctagttaccctaatttaatcattgcacattgtatgcatgtacaaaaatacatattccataaatatgtacagcaattatgtaacaaagtttacataagggtctctgacagaagaagcattttcccacattgcatagtgacagccaaaatcttaataggtacaataattaaagttatgaaagaattgctattgaatgaagaaaatatttgtctttagtgctttactttagattattttgagaggactatagtgtatagctaagaagcaatcattcaactcagggtaggtgggttaggtttaagaaaatctgatgactccattgagaattgtattaaagctcagccaagagagctgagctgtaacaatatttaatttgccacattgcagtttcatccatctagaagtgtaggaaattcaggttttcaggttcactcaggatatgaattgttaacttcctcttagcagagataatatattactatttaccagataatcttaatactctaacttatatttttacttcagaagtttttctagaatttatctaggttacttttagataagtaaatcaggccatttgtttgtatttattattggtatatttctgtataatttccttatgcctgtgtagatcgtggagttcttttgaagtcaatttcaagtcaagattatatttatgtacatgatttttttctcatatttctcactttcccaccatatgatctaggtttgctacatcagaattggagagtgacatttaacttagtgtttccggaataaagaatctggagcttttactaccccataagtaatctattttagcctttctaagtctgcagcttcctttcactttgctttccaatctagcatttcacctctagttttaccccagttatgctttatagattaaacctctgaaatgtgtttaatctgtatgaaatgaaattatagctgggcacagtggtgcacacctgtagtcccagctacttgggaggctgagcatgagagtcggttgagcccaggagttccaaaccagcctgggcaacatagcaaaacgccatctctaaaaaaaattttttttaaataaataactaacagtaaccttaaaatgaaattatggttcttaatgatagtggcttgttacatctcttatagccccacataggttagatttttcaatataaaattagaggataggcacattctttctttttagatgcttaagaaattacctcacataaacattttaccatttaaaaaatgatgtttaccagtccatttcagttcttcaactgaggtccattataaaatatactacttttgctgtataccaagctacagttgtagatattgattcaagtaaaggtgatacttcctcttccagttgatttttatactcttaatttgtgtatacatacattttcacacatgaatatgtgtgtgtaagagacagagtgcattcatttgcacccagggttggaggaaagaagagaaagaaatgagaatatgtatattggagatacttggctatttgtacctcacctgcccatgaaggctaaaaatggatggttaaacacctgtctctgtgctcatgatgaaaatgacctttgcaaaaaaaaaaaaaaaaaaaagaataaacaaaagaaacacaaacaaaaaaactttagaaaataacctttgcttctagaccttctaaatttttctgaatggagagttttgtggtttccaaaagtgaaatagtagaagcaggaagaaaatattctcttacctaggtgcaaaactggcccaggccaaattctaatagacacttgcctttggcagtctcccagttgtctctcttcatgtttcccccacctttgtctgccccctccttagttgtgtgttgagctcctcactgtgccattttcctcaggtctgtagacatgcctcttcttataccccacaaaatcccctccagtttcctcctaatattatctataaagcagaagaaaatagcctgatctgtagagtgaagggggattaggctctaacgtcagtgtattagccctactgctgaaaattcctgaaattcttaatcgattacaatagtgttccatacttaaatacagcacagcaagcttttctccagcattgtgttggatcgctgtttctttggttgaacacagatgatgttgggttatatttaggggccacatagtttgaaaataattcatgagtgtttaaaagactagcatattcagcatggtaagatgcactcgtgaggagatgggaccctttgtacttcctagagtacaaagaaacactgacctagagaaccatattctaagaagtctacttttgtttaagcatttttctgggtcagctccagtaaatgaatcttgctattcataatatttcttcttctgaacctataggtttttaacttagggatgagagtccaggatagtagctatttgtacatgtttgcttattttcaatttatgtgtttgttagggattgtccattaacttacagctgttttcactctgatcattgttcctagcaagtatgcttaggtatggtctcacttcctatcacctcactctaatgagtcctcttaatccttatcagaaggaaattccatttcttcttaggggaaagtgaccataatagtgtgtaagattgagttaccttaagttgtatatttcagaagtataaatcaatatttactcaaatgcctggaacttctggttcatctgttgtgaatataaaaccacttatgggcaaatgttaagtgtctagtatttataccagatatttatagtctttggagcctttcctaggatcatgaatttaggctgctactcaatttttaatactttacccttatactttcatttgaaaaagaaatgattgtttagaatggatttgaaagtgtctattaaactatatctaagagcaattataaaactaataatgtgtgatgaaagataagatggtcatcagttataaacaggaaaaaagctgatggtaaatacttatgcttatacttagctagataaaacacacatttaagaaaaaaaaaaactctaaatatacagttactttgttcctatatataccaccagtaaatacgatacatggtttgtaggtagtgaaatattattttaaatgatttttctttctagaattagagtatagccagaaactattaactaatcttgtacaagaaaactactagaaaatcaacagtgaggaagagttagaattaattaaaatctacctaaaactagcataagcataaaagctaatccatcaatttatataaccaaagattaaggagcttgatgcagagctcaatgaacatcaccataatctttttcttgactctccatttctcttgccagcccctgccacattgcttggatcctcagcgtggcaaaattccatagataagttttctgtagtcactgtctccagttccttacctttcattctcctgtaagtctactccagtcatgcttttgcttcattcaatccactgaaacttctcttgtcaagaacacctgtgatgccaaaccccatgatctgttcctagtctccaggttccttgatctattagtacttgacacagttgatgaggttctcctgcttgtgcactttgtcacttgacttccaggattccacactctcttgattttcctcctatcatgctagtcatttcttcttagatgtctttcctcgttcttcctcttctcttctcacactcactcccttgatgatttgaactagtctcaaggccttaaatagtaattaaacactgaggaccctaaatttatatctcaagacctctctcatgagttctggagtttcatccgactgcctgctttatatcaccattcatatagctatctcacacttaacctgtctaaaacaactttttttcttcttccaaaatgaagtctaccctcagtattctcccttttggttaagagtatcttcatcctttttgttgctcaagtcaaaaactctggagttatcctgactcttctcttttgttatgttccagtttcattagttaggatgttttattggctccacccttaaagtatatctagaatctgaccattctcatgacctttactgctactatgcttatctgagccaccattatctctcacctggattattatgttaatctctgtgcctacctttgttccctgtataatattctgaatttagtagccagagtgatacttttaaataaaagctaatcatgttactcctctgtttaaaactctccatttgcctggccatctttgttacctgtctgatatcatcatctataactattctttctgttaccttgactctaacaacactggtctacttgctgtttctcagatactgtgtatgctcttgtcttgggccttggcatgagtgttttctttacctggaatactcatcccacaaacattcacgtggccatctccttcatcttcttctagtcaaggtattaatatgtctgatgagacacctaccctgactaccctattctttccaattcccattacactgccctattatttccataacattgtcagcatctgacatactttactatgtgtattatttattttctttctcttctcattacagtgtaaatgccataagggcagtggtttgggtctcttgtttattgaagtatgctaagcacctagaatattattttacatatactaggtactcagtaaatattagttgagtaaatatttgtagaacagattcatttcatattctccattttgtggttctgcttcctttatgtcaagaccatgtttaggcattatatgggtcccagaagttcctgaaaaccctccagattcaaatctagccagaaagaggataaatctttgtcctagcattcccaggaaaaagactgaggttcactaaactattttaaaatgccttattcagcccttgaccagtcagccctggccaggagaaacgcaaaactctttttggcctagacttgaaagttggtcatatgttccaagtctgaaactagaggtaaagatacaaacaaaaatgtctattcagggaattagaagctactgaataagcacacaagaaatgtctactcacttttgtataccattggtttacaactgtgatccttggttactggctgcatgggatgttagtaggtgctctttgaccatgccccattaagttaaaaaacttaaatttaaacaatttttactcctgtggaatttctcaatttttaatatggtaatgtattttgtgaatctctaagccagatatattttatgcatcagtttccccaaattctttgaacatgaaaccgtttttcctccagaatatctcaaggtatattctcatgcagctcactatgagaaatattggtatgtccgctaagaattagaaaattgaagaaaaatctcatgcaacaataaaaaagaaaacaaaagaatacttttcaaatgtacaggacctatttgaagaaaaaattttttacaggcccccaaatattttaatatatagaaagacagtcctttgaaagatacttacggctgggtgcagtggttcacgcctgtaatcccagcactttgggaggccgaggtgggtggatcacctgaaggtcaggagttcgagaccagcccagccaacatggtgaaaccccatctttactaaaaataaaaaaattagcccggtgtggtggcgggtacctgtaatcccagctactcaggaggctgaggcaggagaattgcttgaaactgggaggcagaggttgcagtgaggcaagatcgcaccattgcactccagcctgggcaacaacagtgaaacttcttctccaaaaagaaaaaaaaattagctgggcatggtggtgcgtgcctgtagtcccacctactcaagaggctgaggtgcaaggatcacttgagcctggggagatcaaggctgcactccagtctgggtgatagagtgggaccctgtctccagaaaaaaaaaaggtatttattctcaataaattctatgtagttgcagtttaaaatctagtttagtagagaggggtgtgacgggaagaggagaacttaatcaaatgattctaaagtttcattttgttgtagactgtttttattgcaagaaagcataatacctcaggttacctaagaaaagtttattgtattgaatatatagggtttaaaaccagtatcagacagttatgatatgtactttctctggttggctgtgtgcttttttctctccctctgtggcatccgtatatatttgtaagcatctgttttgtttgcttatggttatctgctcttagtccccatactccatactccaaatcttgaattaaactgctttgggttgattttagttaatctgtcgctaatggatggatccttttaggccttctcattttattgattgtccagaagccagtagatgggctatccctgggaaaattatgctccctgatcctgtcagcatctgctcaatcctacttctgtggtcagaggtaagggttggcaagatttaactagaaggcgaagttgggtgtgttaggcatcatgactaaaataatctagaagaaaaaataagaatagccagaggaattctgaaaagagagtatctctatatattgcaggggtgtagtaatttaagctgtggaactggtgcctgaataagcagttaataaagtagaaatacaattttcaaataacataaaagtgaaattactaattagaggtatgaattggatgttaaattgttcaggagtacctaattggccgttaaaaagtaaaattcctatcctgcaatttaacactaatatcaaaatggtttaaagatttaaatgcttaaaaatgaaatagtatcagaggaaagtacaggttgcgttgaaataaatgcatagataatatttaaataatattgaggtgaggaaggaattttccctagcgtaaaactactgagagttcattaagattttattgtggagattcaaaaagaaaggtttattatactaaacgggaaaatgaataaactaagggggaatatttgaaatatgaccatagtacatattttaatatagaaaggactgttagaaacaatttgtgtgtggattgggggtgcttaatcctacctggccatcatacagtattaccctagtccatacactctccatacactttcttaggtgacttttgtatcttattctcttactacatacttccaacaactgttgttgagccgtaactctttggtgattactttgcgttttatttcttcctcactgagaaaatggaaccaatcagaagataacttataaaggcttccaccaatatataccttatgcccatgtgcctacatctctgtccgtttaccgtatatgttttcttctgtaactgagggtgaatgctctggtatctgtactgagaccagattctacacttgcacattagatcctactcacttgcttattcaaggatattgcttagtaattctttctctgctacattatcaattttttgcctctttactagctcagtcccccatcttaaaaaaactacttttctcctaatttccctccagctacatccctattttcttttccttcaccacaaattcctttccagagatgtctcaatttactgtctttgatttctttcctcctttctctcatgaaccctttccaggtaggtttttgactagctcatgccaaagaaactgttgttatctaggtcatcagtgaccattataccaccaaaaaaaagtagtcatttcccagtttggaagaattaaatctttttaaaaaatgtaaagaatgcctactacagcctaatagggtggttcacaatacagaaaaaggccaataagggtatgaaaagtagtcaatttctagaaagtcaaagaaatgcaaatttaagacaataagatgtttcttattcactgtccagtgtcggcaaggaaatctagaactctcatataccatttggttatgcaaatgaaaattggtacatttctggaagcaatttgacaatttttacgagagctttaaaattgtgttcgtcttttgacttgcccattctgtttctaagagtatgtctcagggaaataacacacaaatgcatgatgcatccacccacatacaaccagggagggaaggattcatcaaggcattaattctggaagggaaacatgaaaatgacctaagtgtttgacaataggagattggttaaagtatgctacatctatatggtagaataccaagtagctacttaaaatgatgacattggtttgtttatttatttgaaattattttaaacttttttcacatcaagttgccattaaagatatgtttattaacatggaaagactttaatatgttttaagaagtgtattcaatgcaaattttgtggggaacaaagtatattacatgcatgtggttatatgtgtgcacatacataggtacatatcaatgtatgtataggaaaatgcctagaagattgtataccaaaatgtttttcagctgctgtcaagtagtacaattttagatgttcttttaaaacttggaatgcttgcattaacaacaacaaaaaaagaaaatgaaagttttgcaaaagaaagaaaatcaatatcccaattatagtctgcttactttttctggttttacattcaaacattgatcattagacttggttcatagctggctggcttgaactgacccagtcctgtttcataaccctgctggacttaaaacagcctaatggtctgccagctgtgagagaatagatgagccagataaagtgtatttaccatacttttaactcctgagctgcttgggagtctttatagactcctttgattaagtctaccaggagaccagctactaactcagtaaactaatctgaggaataatgtaaagttagaataactaggataggtagagttaaactccagagaaaaaaggtgatgaaaagtataaggcaagcttattaaggatgggcttattaggaacctgataaaaggatgtgataaaaatgaaatcaaagggttttacagtgctaaagtttaatagtattacatgttggaattgtttcctgtttcttagtataggtaatttctgtatgaatggaaaattcatgtgtaatttttgttgtactccaaagaactttagccacaatttattgtgaaatatttgcaaccttgaaaattcagaaatctagcaataggatctctctctgtctctctcttgctctagcaaacgactgcatatatttcatacacacacacacacacacacacacacacacacatatacatgtatagtatattggttttgtataaggtataaaaagcaaattattataaaaacaatacatatgctcaatgtgaagaattttgtaaataaaagttacaaaggagtcaatttttgctgcctttttcaatctttcaacgcataatatgtaaatttgcttatttatgctctatacttcatgtttatatcttgtctttttcacttaatattttatgactgtattctcatatcattaagtattctttcctttaaaaattcccatttaaagatagtcaaagcaatatgaatttgttaatgatttagtatatgaattggagaaaacatattttctgcagtcttctttcttaatgggagctgacagcctaatgatgaaactatatcattccagctatattttaaaaaattacatagttgtcaagtttttgtttgactaagtcagagggttcattaaagattgtaaggctgacattcgtagataggaactttagtttcactttccctaagacagcaagaaatattctataacagaaagatgactatttttagcttttctttctgctggtgaggtggaatagcaaatatttttagagcaattgaaagtacagcctcttagattagctcagtgtttctatcatcagaatctcaattattttatgtatctagattttttttttacttccaatgttttgagtttatgtaaattgcaacatgattcgtctttttatttttgatctagttcgtttctctgtggaacaatataaaagatgaaatttctaaaaccttaacttttctttctgcactttttatgtattttgagttgtaattatattctgcttattgtgggcagttctcttctttcttggagatgaaactttgataattaatacttacggggagatggtgttacaaatcttctctcataataggctcttaatattcacaagagagatcccccatgaccattgtaagtacccttaattatgaacaccactagaacatttcatctttccccaaaacgatgccataggataagtgaaaatttgagggacttctgtttttacccttaatgaaggacatcttggttgcttccaggttttggcagtataaataaaggtgctgtaagcatccatgtggagggctttatgtggacatatgttttcagctcctttaggtaaatactaaggagtgtgattgtgggactatatggtaagagtatgtttagctttgtaagaaactgtcaaactctcttccacagtacatggtgctatactgtaaatggtattttttttatttcagtttctgattgtttgctgttattatatggaaatacgactggtttttgtatagcatcttcaccttgctaaattcgattgttctagaagcgttttgtagattctattgaattttctacataggtcatattttctatgaatagacagttttactcttttccagtcttgatgcatttttcttgctttattgtgctggcaagaaccttcagtataatgttgaatagaaatggtaagagtggatgtcactgcctcattcctaatttttgagggaaaacattgattctttcacgtctcagtaaagtgtttcctgtaaattttcatagctgtctattatcgatttgaagatgtttacttctattcctggtttctggagagtgtttattaggaatggttgttgggtttttgtcaaatgcgttttcctcatctattgagctgttaatatggtgtttcttttttagtgcgttaatatggtgacttgatttttgaatggtgaaccagccttgtatttttgcaacaaatctcccttagttatgataaattattgtttttccatatggttggattttatttgctaaagttttattaagagtgtttgcatttatgttcatgacaggtaaatggttggtaattttttgtctaataaggtcttggtctcattttggtaccaaagtagtactggcttcatagaatgagttaagcatttctttcttttccatttttttttggcgaggatggggaagagtttgtgtagaatcaatattttttcttgtcaggtagaattcttcagtgttttgaaaacatttatgtagggttggtattatttttttcttaagtatttggtagaagtcccccgagaatacacatgggcctagagttttctttcagagaagttatcaaattacaaattcagattcttgtagggctattcaggttatcttttttcttaagtaaactttggtagttttttgtcttaagacatttgtccattcttgctgagttataagtttttgtcataaaggtacgccaaatattaataatattctcttcacatccatagaatatgtagtgatataacctcttattcctgatatcgacaatctatgtcttttcttctttgttctcttgattagtcttgctagagatttcattttgattttcaagaagaaaccagcttttggtgtcactgatttttctatatttttgtttttcaatttgattattttctgctctgatctttattattttctttctcctgattcctttgggtttcatttctcttctctttttttagtttcttaaggtataaactgaaaccattgatttaagaccttttttttctaatataggcattttagagctgtaaatttctctctaaatactgctttagctgtatcccacaacttgtgatattttttgttttcgttttcattcagttcaaaatattttgtagttttccttttgatatctttgacccaggggttatttagaagtgtaatagtttccaaatatttgggcattttcctgatatagttcttgttttttaaactaacacataaaaattgtacatatttatggcgtacaatgtgatgtttcagtacatgtataaattgtgtagtgttcaggtcagaataatttgcatgaggccttaaacattcattgtctgtttgtgatgaggacattgaaaaacctcccttctagcgtttttttgttgttgtttttgtttttttgttgctgtttcgtttcttgagacaaagtctcattctgtcttgcccaggctggagtacagtggcatgatactgtttcactgcagcctctgcctcccgggttcaagtatttctcctccctcagcctcccgagtagctgggactacaggtgtgcgccaccacacctggctaatttgtatttttagtagagttggggtttcaccatgttggccaggctggtctcgaactcctgacctcaggtgatccacctgccttggcctcccagagtgctgggattacaggtgtgagctgccatgcctggccccttcttgctattttgaaatatgcaatacattattgttaactctagttatgctaccatgcgttagaacacgagaatttatctatctaactgtagctttgtacttgtggaccaatctctgcctatttctcttccctctgtcctccccagagttctcgtacccctattctattctctacttctgtgagaacagcctttcagattccacatgtggatgaaatcgtgagatatttgtcttactatgcatggcctatttcacttaatgtcttccaggtttatccgtgttgccacaaaagacaggattttattctttttgtggctgaatagtattctatcatgtctccataccacattttcttcatccattcgtctctctgtggacatttaggttgatttcatatcttgcgattgtgagtagtgccacaataaacatagttcagatatctttttcacatgctgatttcatttcctttgggtgtatatccagtagtgggattgctagatcatatggtagttctatttttaattttttgagaaacctccatactgttttcagtaatgactgtactaattaacattcccaccatcattatgttaagggttccctgttctccttatccttaccaacacttgtcttctggttttgtgtagagtcagagtaggccaggtgcagtggctcacgcctgtaatcccagcactttgggaggccgaggagcggggcagatcacctgaggtcaggagtttgggaccagcttggtcaacatggtgaaatcctgcctctacaaaaattagccagatgtggtggtgtgcacctgtagtcccagctactctggaggctaagacatgagaatcacttgaacctgggaggtgaaagttgcagtgagccaagattgcgccactacaccccagcctggatgacagaacgagtgtctgtctcaaaaaaaaaaaaataataataataaataaataaagagtcacagtcttgctctgtctccgaggctagagtgcggtggcacaatcatagctcactgcagccttgacctcctgggctgaagtgatcctcctgccttagcctcccaagttgctgagactataggcatgcaccaccatgccctgctaagtcttttaatttttttcttttggaaatgggttgtcactatgttctgcaagctggtctctaactcctcgcctcaagcgatcctcccacctcagtctcctgagtcactggaattacaagtgtgatccactgtgcccagctgtcttgattttttgacagtagccattctaactggagtgaggtgatttctcactgtagttttgattgatttgcatttcccttattattagtgatgttgaacattttttcatatatctgctagccgtatgtatgtcttcttttaagaaatatctaaattcaaagtgaattagagatttaaatgtaagatcggaaactatgaaaatagtaggaaaaaaacataggagaaaagctctgtgacattggtctagacaaggcttaaaccttgaaagcacagagaacaaaagcaactatagacacatggcattaaattaaactaaaaagcttctgcacagcaaaggaaacaatcaagagagcacaacaacctacagaatgggagaatatatttgcaacctatacatctgataaggggttaatatataaagaactcaaacaactcagcagcaacaaaccaaataacccaattaaaaactgggcaggccgggcatggtggctcacacctgtaatcccagcatttcgggaggccgaggtgggtggatcacttgaggtcaggagtttgagaccagcctggccaacatggtgaaaccccatctctaccaaaaaaaaaaaaaaaaaaaaaaaaaaaaagtatatatatatgtacacatacacacacacatactccagacgtggtggcgcacacctgtaatcccagctacttgggaggctgaggcaggagaattgcttgaacccgggaggctgaggttgcagtgagccaagatcatgccactgcactccagcctgggcaacagagcaaaactccataaaaaaaaaaagtaaatgggcaaaagacctgaatagacattcctaatatatttctgttatttagtttaattgaattctactgtgggacagtatactttgtatgacttgaatcctcttaagttaattgagatttgtttttgactcagaatatggtctatcttggtaaatgttctgtgtgcatttgaaaaaatacacattctgctgttgttgagtggagtgttctataaatttcaaagatcagattggttggtaatattgttcaaagtcttctgtattcttccaatttcctgtccagttgttctatcacttattgagagagggatgttaaaatctttgctcataattgtggatttgtttatttctcattgtagttctatcagtttttgcttcatgtatttggaagctctactattatgtacatgtcctcttgacccctttgtcactatacagtgactctctctatccctagtaatattttttgttctgaaatctactttctctgacagctttggtttttgttgtttgctttttgcttttgtttttattttttaaagatggggtctactgtgttgcccaggctggattcagactcctgggctgaagcgatccttctgcctcagtgtcctgagtaggtgggactacaggcccatgccaccatgcccaggtcatccagctttgttttggtcatggtatatcttatccttctttgttaccatgatgtatcttttctatacttttactttcaaccaatttgtgttcttatacttaaagtggatttcttaaaaacaggttatagttgtctttttttttttaactctctcatatctgccagtctgataatatcagccttttaattgggttatttagactatttacattttatgctattgttgatatggttgcttttaaatttaccatcttggtatttattttctttttgtcttatctgttattttattcctctttcccctttttcatatgccttctctaggatgattttttaatgattcaatttttgtctcctttgttggcttattaactataactctttgttgtgttattttagtggatgctttaggttttgtagtatacgtctttaattcgtcacgaccctacttcaggtgacattttaccactttacaacagttcatttttattttccccctcctggtctttgtgctattcttgtcatacattttacgtccatgtaagtttgttgttgttgttgtttgaaacagagtcttactgtgttgcccagactggagtgcagtggcgtgatctcagctcactgcaacctccacctcccgaattcaagtgattctcctgcctcagactcccaagtagctgggattacaggcacccgccaccacgcctggctaatttttgtatttttagtagagacaacttttcaccatgttgaccaggctggtcttgaactcctgactcggcctcgcaaagtgctgggattacaggcatgagccaccgggcctgacctacttctataaaagttttaaactgcagtatgttgttgttatttttgctttaaacaatcagttctcttttgtggatacttaaataaacaattctttatatttatcgatgttgtttccatttctgatattgttcattcttttgtgtatatccagattctaatctggtgttgttttcctattccttgaaggactttctttaccatttctttaaaatgtaaggactgtggtgaattcttttaccttttgtatgtctcagagtttttattttacctttgtttttgtaagatgtttttgctgagtaaagtgttaacagttgacatgtttttttgtttttttttttcttttggcacttcaaaaattttactccacttcttactctgttttctgcttgcattatttttgacaagaaatctgctgttatctgtatgctgttctatatatttcctttgtcttttttcttctggctgctttgaagattttgttttcactgggtcttaagcaatttggttatgatttgctttggtgttgctttattcttgtttttttgtgcatagggtttattgattgccctgcctcagcactcctatttcttttaaattctctcttctcttgctttttcttctgtatttctggccacctcttatcttacttaacctttaaatattggtggtcctagggattctgttgtgttttgattccacagggtattctcaggtcatctcattcactcccataacttaatctgctctctgtatgagagatttcctaattgtttatctctacccagacctctctctaagcttcaggttagtatttctttacagccatctctacttaaatccaaagaagccctattgaacgtatttggaatgaatagacctggaggacagctcactaaaaaacttcaagaggctgggcatggtggctcacacctgtaatcccagcactttgggaggccaaggcgggcagattgcttgagtccaagtgtttgagaccagcctgggtgatgtggcgaaactctgtctctacaaaaaatacaaaaaattagccagatgtggtggcacacacctgtagtcccagctacttaggaggctgaggcaggaggatcacttgagcctggaagatggaggttgcagtgagccaagatcgagccactgcactcctgcctgggtaacagagcaagaccctgtctcaaaacaaacaccaaataaactttaagggcaaaggataatctcagagtacttgggcaagttgctagaaaacagtattctcaggggaagcatcaaaggggaaaatggccaagttgatatggtagttgacttcattgtagttccaccagaaagacaaaaaataaacaaacaaaacccttatatctgacagtcgcaggtaacatagcgttgaatactgtggtgaacaagaaattgaaactatagttctcaagggagttaggccctagaagaatcacttgtgagccagaagggaggaataaggacaagggagtcctaggtggcaactattggatggtttagaactctgccaagctaaaaggataatgtgagatttacctgaactcatgaagtgaaatgcaatcctagaggctagtgagttgctgctaggaaataacaatgaaaaaaatcctttcacagtggttctaaaacactttataaatcctatttcttttaattatttaatcattttattttggttggttttataggaagaaaatgaaatgctattagcttaatttgattgccacaccaagatgagtagactctcttcataaagtggggaacaaatgaaaatctttgaaacagaagtgatatgatcagcactgtgcttattatatatacccaaaatacatttttggaagagtaatagtcactattttttcaaaacttagcaatgcagtatctgcagtgattccctttcatttagtttctcatccaactaaataagccaactagaggaaccctaagaaaatagaattttattttctttcttgggaagtatctgcaagaattgagaagcttggaaacatttcttgtaaggtaaaagctgtttttttttttttaagcctaaatctcagagtgttatacatacaaaattctttttatttttttctttttctttttgagagagaaggtctcattctgtctcccaggctggaatgcagtggtacaagcgtagctcactgcaacctcaaactcctaggctaaagtggtcctcctgcctcatcctcccaagtagctaggacctactggtgtgagccaccatgcctggcacatttttaaaactttttgtagagagtgtcttgtagtgttactcaggctggtctcaaactcctggcgtcaagcagtcctcctgccttggccacccagagtgctgggattacaggtgtgagccaccacacctgtcccaaaattcttatatgcaattctacataccctcttacacacagagacacacaaagttatgagtttactgttctggggcattttttaaatgttaaaattgcaactactacttagtctcattttcttgtctataagtcttggcatatgtcatgtatctattttagaaaagtaattttaaagttagtagattaagaaacaacatggttgtactaaaaagtgccttatatataaaaaaatctttccatggaataccatggagactatttttccttatgttaaataacatggaggagtctgcactataggaaacaatttgcttagaaactaatttaaaattactcagagccacatctagaaatgtaagtgaactcacaggagtagtacctaattaagtatattctgtgatattatagaaaccttatttataaaaggaaacttgtataatttctgtcttcagggcatttattgataaaatagatgtaccttcactactgctatgcttcattgtaaatgataatgttgatctgtatttgtaccatgtccaaacataattataggcggaaaacacaggcaacaaagatgtggacataatataaacctaaatataggtatatgtatacatatgtgtgaatatacacacacacacacacgtatacatatatgtacacatacgtgtgtacatatgtatacacatgcacaaaaagatctgagaaagtatatgctagtaatacctttatctctctgtgtctgtattgtctgaatttttataattgtgtaatctttattgataatgatggtgggaggttatttttattttgaaatgaaaaaataacatgggtattccagagaatttgaatcagggtattactcttgcattcttcaactactgatggctataactatgtaaagaagtaaaacatttcctgtaaagacagtcagaagttaggaagatctcatctttatcctgtggacatacagatattttttctttggcccatttaccacagtcgtgacttccactatttcttgggttgtggttttttttgttgttgttttttgttttttttttttcattcaaagttataaatgaacagccaggtgtggtggttcactcctgtaatcccagcactttgggaggccgaggctggcggatcacttaaggtcaggagcttgagaccagtctggccaacatggtgaaaccccatctctactaaaaatacaaaattagccgggtgtggtggtgcatgcctgtaatcccagctacttgggaggctgaggcatgagaatctcttgaaccgggaggcagatgttgttgtgagctgaggttgcaccactgcactccggcctgagcaacagagagagactctggctcaaacaaacaaacaaacaaataaacaaaacccaaaagttataaatgaatatagtttaaaatgtcaaataggctcattttaaaaatcccatgttctcatattctatcatttctgtctttctaggggcaagtattttgatctcttttggcttttaaaaaaatgtataagtaatatgcttgcattgcaaattgttgcattttcagttttaggcattgtatattgatttcccaccatgggagataagatttggcttatttgccactcctaccgtataatctgtttgtcgccctgtcttgattatattgtaattttgtttggatcatcccatttatactttattatgactatgtaaacactatttgtaagtgagcaatgtagtgaactatttttcatttcttgaatacctttttattttccctgttctggtcattttcttttctttttttttccccctgtgtacttatttctcattcattgccaaaatttttttgccactgtgtaaatctccagatggataagatgaatgtctaaattcatgtgcatgaggtaattctgtcaatttcatgttctatgagaattccctaccagagccttctgaactgatactctgctaaacccaaacacaggatactctgtcatcttgaggtcttctttcattacatctcagatattattttgcctcttgcctgtgttaatcttgtatttcataggcccatgtcctgttctttcttagttttctccctctttttagtgtggcatatctcttagtagttcataggaaaaagctgcatggaaggtaattttttaaataaagcatgcctgaaaatgttttattctatacccatactttatttgataatttggctgggtgtagacttcaacataagaataattttcctttagaattttgaaggcattaatttttccattgccttctaattatagtgttgttgaaaagttcaaagttaggctggtttccgattttttttttctcctttttagagacagggtctcactgtgttacccaggctggagtacagtggcatgattatcgctcactgcagcctcaaactcctgagcttaagccatcctcctgcctcagcatcctgagtagccaagtctaaggcctgtgttatcatgcctggctaattttgttattttttgtagagacaggtttgctatgctgatctaagctgacctcaaattcctggcctcaagcaatcctcctgccctagcctcccaaagtgctgggattacaggcatgagccactgcgccccagaccagtttctgatctttttctgtaacctgttcttgccccacctctccagaaacatgtaggattctttttatgtgcagtgttctgaaattttattgccatatgaaccaattttagccattatattgggaatacagtggtaatctggaaacttgttctttacttgtaggaacttgtcttgaattatttcattaattatttcttatttccttccttctgttttctctgttctctctttggaactcctattcccagactaaccctctaattttcaaacctgttttcttcctccttgtctttttgctttactttctgggagatatcctgaactttattgtccagcctgtctattgagcttttcctttgtgcatcgtatttttaccctccaagaactttgtgtatacatataaaatacagatgtttcttttttttaaacaataactagttaattgtttttgtttctgtttttgagacaaggctggctctcacccaggctggagtacagtgttggaatcttggctcactgcaacctccacctcccggattcaagtgattcttatgcctcagccttcccaggagctgggattgcaggcgtgtcccaccacgcccagccaatttttgtatttttagtagaggcggggtttcaccatgttggcctgacctcaagtgatccacccgcctcagcatcccaaaatgctgtaattacaggcatgagccaccgcgcctggccttggttaattgttttatagttgtaccatggttataaatgatagcttttttcagagcctttggaaatttatctaattgttgcataatctctgcctgttcccagctaccttttttttttttggtcattttggtcaccattattccacattgaaggctttcctctgatacttggtcgtgctggcatgtctgttcattttttttgacttattttaattaatttatttattttgagatgaaatcttgctctgtcacccaatctggagtgcagtggcatgatttcagctcactgcaacctctcctgggttcaagtgattctcctgcctcaggctcccgagtagctgggactacaggcgcaccatgctgggctaatttttgtatgtttagtagggatggggtttcactatgttggccaggctggtcttgaactcttgaccttgtgctctgcccgccttgacctccgaaagtgctgcgattacaggcttgagccaccgcgcctggtcattttttaaacctgaatgtgacatcaagctttatagacccagttccagttttgaatttctttttttttgagcagttctatctgacttttgcaggatgaaggaagggcagttgtccagctaactagagaggatgaatggacctggggatctgataacttcataagcaggttttcaagaaattccccttgctttagctatattctgttagccccacttgtacaggtattttgcattataaattagatcagttctcctatttcactcagcttcactgctagttgaggatgcgtttttctttggtaactttgttaccactcatatatttgctttccagtttctacactttttgttgccctcctatttctttctcctcatttgggtttattcttttacaacacaaaaacaaaacaggcaagcaaagaaaaatctttactgaccttttattggaattttaggatagagtaaaagaagatgatgtgctaagctagcaatctctaccaagaccacttttttccttttgttttcattttattttatttatgtatttatttatttttgagatggagtctcgctctattgcccaggctggagtacagtagtgtgacctcagctcgctgcaacctcctcctgcagggttcaagcaattctcctgcttcagcctcccaagtagctaggattacaggtgcacgccaccacgcccagctaattattttgtatttttagtagagatggggtttcaccatgtcagccaggctggtttcgaactcctgacttcaagtgatctgtgtgcctcagcctcctaaagtgctaggattacaggcgtgagctaccatgcctggcctttttctccctttagatcttttgtttaggcagttcaacttagcagtctagaatgggaattttcaaatatggctgcccatttagaatcacctggaaaactttattatttacttattttttgagatagggactcactctgccgcccatactagagtgcagtggcccaatcacagctcattgcagtctcaacctcccaaggctcaggtgatcctcctgcctcagcctcctgagtaacttgggttactggcgtgtgccacgacgaccagctaatttttgtacttttagtagggacagggttttgccttgttgcccaggcttaaatgatccacctgcctcggcctcccaaagtgctgggattacaggtgtgagccactgctcctggccaacctggaaaacctttaagaaatattatatctggatctcacaattagtgggattggttgttggctagggtgtggttttagttctccaagttattctgttgtatagctggatttgagaattctgatctaaaaaaaaattttttttggaacaaatgagaaaaagcagcagattctaaaaatatgactgttttttattagaacatcatctgttaaaacattccagattctgctagaagtaataacctttctcagtggtattaggaattgagaatgagtttctctgaagggtctgttcctgtttgcattccaacaaatggacgcagtatccaaaattaagtcttcattggaagtgagaaatagtattgtagaaaatcaaattagtagaacagaggacaaacttgagaagcagtcacagaatgtacaataaataaatgttagaaaagataaacattgataatgaaaatctaaaatagaaataattttttttctcttggaaaactaaaagacatggataaacagcagtaatcagtgataaacagaaaaaaacttttaatatataatgtgttatataacatgtatttcttaaactttgtaacttataaatattagaggatacagtgtattactattttttagagacagggtctctctgtcactctggctggaatgcagtggtacgatcatttttcactgtaacctcgaactacagggctcaagcagcccttcccacctcaccctcctgagtaactaggactgtaggcacataccaccacacctggctgatattttaaagttattttttgtagagacagggtctcactatattgcccaggctgctgtcaaattcctggcctcaagtgatccttctgcctcagccacccaaagcactgggttgacagacctgagccactgcacctggcccagttacttttcaagtgtctgcaatatttataaagctatatatatacttgaccgtaaacataatagctaattcaaaacagcagaaactataaaagttgttgttgtgagtatactaaaacaaagatttttaaaatgacattaaaaaaataaattatgaaaataaggcattaatgaaaagccaaaagaaaacactgcatgcttttatgatttaaaaagatgaagaaccaagaatttagtataaaatttaagaaaaatagaagtagtatattaaagataaaggtaaaaattatttttaaattgtgtttatatagtggatactttgcagacgttgaagtggattagataatttatgtatatgttgaaatgaaaacatgtcctcaaaacttaaaatcttaatgaaaaagcagattgcaaaataattgtatttacacacacacacacacacacacacacacacacacactcttacatagatttatgtgtgcttataagtccctatagttgtataccaaatttttcataatgttcaggggttttcttcatcctgtagggaagcagctagattatggggtagacttttattttgtaatctcttgtggttttaatttttgttttttacagtgagtattgcatattttctataattggaaataaaaaagatatgttcattttgagggggggaagcaatatttcaccatacgaaactagaaaaaatagtttattacgcattgcatgcctgtatcaaaatatttcatataccccataaatatatacacctgtatacccacaaaaattaaaaataaagattttttaaaaataggaaaaaaggtggaattaataaataaaccttaaaagaaaaaggcttatgaaagaggcaaaatatataagcttcttgcagatctgattaaacaaaatcaaccatagaaagtagatttaaatcacatagaagaaatatatgtatataaatattaggagcaatacatttacacagttatatgttaataaatttcagaaacctctatgaagtttccagatatattaaacattccaaatgtttttttctacatgtatatgcagtgaaaataatgtataaaatgtgatatactgataacttgacaatattatcaaagaactactttttaaaaaaagaaaaactctgggtttgatacatttgctggtaaattcttcagaactttttttgaggaataaacaatttctgtatactacaaaatgttctcagttattaaaaagtaagcaggccaaagaggaatacaaagaaacaaaggtaacacttaaaaaaaaaaaaaaaaaagctatcattcagtttcactttttgaatatagttgtgttccttaaaatattaactggtagaatttatcagaatattggaggaataataagatttaaattaggctaagtctactggactaaaaccttgatagagatatatatcctctatccagaagtcataaatagttcagtattaagaaatatattaattcatcagatgtaataatagctaacatttattgactgcttactttgggttaggtaggcactgttataagcggttttatatttttatttagttatcaaaataattctaaggtttctctagggttatattacctagatgaagaaattgaagcatggaaatgtcagacagtgtgcccaaggtcacacaattactgaatgacagaactggggtaagcacgcggacttctgactccaagaatccattagcttatttggagtttaaatagaaactttaaaaggtttcataaaattaaatgcccattaataatttttttaaaaagaagtagaaaaagtgttctttaacattatagggaatctttatagtcaacagacagctttatatttatttattgaaaaattatagatgtatatatttatggggcacagagtgatgttacgatcttcgactaccatgtgaaatgcttaaatcaactaatgtatcaagctgatatgttaatcaatttccacaactattttacattttttaggtgatgagaacatttgaaatttactcttagcaattttaaaatgttactagctatgttcactgtgttgtgcaataagatcttattaaaaaaaaaaacttatttctcctatcttctaaccatatctggtaaccaccattctactctttgtttctatgagtttgattgttttagattccacatataagtgagagcatgcagtatttgtctttctgtatttggctaatttcacttaataagcatagtattgtctaattccattcatgtttgtcacaaatgacagaatctctctctgttttaaggctgaatgcttttccattatgtatacttatttaggaccacattttctttatccattcatctgttgatgaacacttaggttgattccgtacttggtattttgaatagtgctgcaatgaacatgggagtgtagacatctctttgacatactgttttcgaatcttttgggtaaatacctagaagtgggattgctgggtatttatttattagtttaaaaaaaaaatcctaggctgggcgtggtggctcatacctgtaatcccagcactttgggaagccaaggcaagtggattgtctgagttcaggagtttgagaccagcctgggcaatgtggcaaaacctcctctaaaaaaaaaaaaaaagaaaagaaaagaaaaaaagaaagaagaaccctagaggtagttactaataatggaggtgcatcagaattattcccagtgggggctaaactcccagacatgtatgttttgaagcagctttgtgggtgattgttaaaaactacagtgttggccgggcatggtggctcacacctgtaatcccagcactttgggaggctgaggcgggcggatcacgaggtcaggagattgagatcatccttgctaacacggtgatactccgtctctactaaaaatacaaaaaatcagggcgtggtggccctcacctgtagtctcagctactcgggaggctgaggcaggagaatcacttgaacctgggaggtggaggttgcagtgagccgagatggcaccactgcactccagcctgggtgacagagtgagactctgtctctaaaaaaaaaaggaaactacaatgttaaaggtacatcaaattttacagcaaagaagtcaccctggaagatctacaaatattcttgtaaaagttctggcctatacaataagacatgaattagaactagaggtataaatgttagaaaggaaaattaaatttttccttacttatggttaagggaaggtttatctgcaaatcctaaggaattggctataaaactagggttaagttcaatttgagtggcaaaatagagcttagaagaacaaaaaccgaaattatgtaataaccactttgaataacaaccaaagtgagagtccacgcaaaatataaatattaaaaagttagaaatactcatttttgctcagttttatcttttgaatttgatttaaacgtaaaaattaactagaaaactattaaaattcttcctatttcttatcccattctctgtctctcataggtaatcatttttaattaatttcagtttatccttctggttttcttttcttttctttttttttttccgaaaaaagccagtagctttatgtattattacttcctctcttacacagaaagtagtagcatactgtatttttttaatattgtcgttgtcactttaatgatgtatcttagagagatcactcccataccaacacatagaaatcatcttcattctttctttggttttagggtattctatgaatgtttattcaatcattcttctattggtaggtattttactaagaatgacattaatgggaacagtgtaactaatctatgatagaaataaaaccttgaagatatgaataaatggacacaggtgcaatagtccaagacaggaaggttaaagatgtaaatatatcagctctcaaaataattcataggtttattgtaattctattcaaaatactattgagctttaaaaatcataacaaaaagatttggaaattcatctagatgaattaaaaaaaatggatagagaaaaacctaactataagataatgaaacagtgaagctataacaaaaaatagagtaccagcaccaggataaaaaagataattgggaacgtggtccagaatgaaacatacaggacataaggatttaatatatgataaaagaagcacacatatccatagggaagggaaagtttatttaacaaatggtgttagtgtaacagtaagcaatttggagtactgaaatttagatttttaaaatatgaactaaaattccagatatattaaataattacatagaaacaataagccaaaaaattaattgtgtatttattgaatttatgcaaaggaacagctaagttcagaattagcagaagaatttaaaaggagattgttgacagattggaccacataaaaatcttttatatcatctaaaaatatagcccaaatgaaatttaaaaaattgtagcagactggaggaaatatttgtagcaaatttccagggttttaatattcttgtatatgaaacccttatgcaaatacataaataggcataggacaaggctggacaattagttaaataggaaattcagcaaataacaaaacatggaaatattttagatgtgaattaaacttctcaagagttaccaggatccattcattaaattagcagcaactcccatgctggccagagtgtaatcactagatgcataaattgctgatggtcttatatgtaaaacaaccatttgaaaagcactcttgcgatgtgtcaggattcataaaaatcttcatactttttgaccctgaaatctcacacctgggaattgatccaaataaaataataacctgccccccttccaaaaaacaaacctttaagcccaaagatatccacagagttatttcaaatagtgaaaaattagaaataacctaaatgactaatcaggggagtaattaaaatgttcatatgtcccctgagagaatacaataattaaaaatggtaatagagactgcaattgaaaatgtaataagggtaatttttttaaagcaagctttcatattgtatctatagtttgatatgagaatgactggaaggaaatagataaaagtcataagcagttacaataagaggataataggtaattcttttccgattttctgtgatccagtgtaatgcaaggctgcactggtaggagtacagcaccgagatcaagagagctaataaacctatgttatgagaggaacacggactttggaggcaggagatgtacagattgagttccagttctgagttttctacttacaaatttgaaggcttgacaagttagtaattactctgaacctcaatttcttcatctgaaaaatggtctgataacattgtcttcatgattattgtatggattaactactagaaagtagttaatgaaagtagtgttctactgacatcacatctggaagaatatatcaatcaacttagaagcaaccttagatctcaatggctaacaactattagaaacaactaaagaagatttgggcatgtaatcccaggactttgggaggccaaggtgggaggattcttgaggccaggcattccagttcagcctgggcaacacagcaatacctcatctctacaaaataaaaaataaaaaaaattagtcgggcatggtggcacccactattgtagtgccagctactgtagagactgaggcaggaggattgcttgagcacaggagtttgaggctgcagtgagctatgatcatgccactgcactctagcgtgggaacagggcaagaccctgtctctaaaaaagaaagaaaaaataaccaaagaaataaagcttctttcccacttatgttatttaactagctgtagactgtgactctgctatatgttttgtttgctctgggatcaaggcagaggggaaacaaagacagtaaagccttaggtgcctcttgaactgcttgaaagtggtacactaccactcctatttcattgaccaagggtaatgtccatggccctgaacattatcctcccattgggataggccaatacagaagggcaacacatattttgaacaaatgatatgtgctgtgacagtgctgtccagttctgtcactttatttatttatttatgaatgaatgaatgagacggagtttcactcttgttgcccaggctggagtgcagtgcggcgatctcggctcactgcaacctctgcctcccaggttcaaactattctcctgcctcagcctcccaggtagctgggattacaggcgcatgccaccacacctggctaatgtttgtatttttggtagagacagggtttcaccatgttggcctggctggtcttgaactcctgacctcagatgatctgcccgcctcagtctcccaaagtgctgggattacaggcgtgagccaccatgcccagccagttctgtcactttaataagggtgtaacaacctggggtacgtctggaggaggaagatttggacagtgagtaattctgaaatctttactaaaatacagtgggaagagtcattggaaagggaggggcatattaagtctcttcaaatatttgaagaatggctgtcactggatggtgagattagttcagtgctgtgtggcatcagtgggtggaagttacggcctcatatattttgactcagtatagtggtaaggagaaaagtgagaagaaaaggaaattattggttgttttcaatatgttactcatttacattcttcaaaataatcctaacagagcgtgtatgtttctgtgtttaaatattggaagaaagactcagagtgaatgaatacccaaggtcacatggcacgtaagtggcaaaaccggtttggaatccaggtctgtgtaatcttgtccctttctacaatattctactactctctgttgggctgcaagcatttttacaattaaactgttcatcaccagtcatcatctgcctgacaaagtaaaggccacatctcacacatgtctaaaagggttcaaacagagaatgaatggaaaggttgaaaggaaggttgaactctagatcaatgatctgcaaacttatttgatcataagtacctcttagcaaagtacttgtacatactatatatgtagcttatacataaactattgtactcatatgttgtaaagcatataggacattcccagtacaaagaaatggtaaacatttgggatgatgtgtgtgctaattcccttgatctgatcgctatatactgtatgtgtcaaaacatcaccgtgaaccccattaatatgtataattattatttgtcagttaatttttttaacctataggaaaaataagagtttaaaaagattaagattttatataacattttagtttttttataaattagatttcaggttttatgtaaaatctcatctttataaaactttgttttgcagatagatacttttttctgtatccctgtggattgtcttttgtacccatggaaatgtatacccccaacattggaggtcattgttttggatgattttgtaagactcatttcagtatgaagattctgtaattctttttgtccagaatttttttgaaagggctaatggtagcttacttcactttcagaaaggtttttaaatagttttatctaaaaccaaaactatagacttcactgtcatttgtaacagcaattaagcccaaaaactacaaagtgtgaaaggtgctattctagataaacagtagcaaccccatgagcattacaatgtatatataaatggagatggaagtgtaggggctattattaagtaagaaacctgatttttatttgtgacataagaaatagccttgttattttagttatatcttctctttctaaacctatatatatccaaaacttactgtagtcatatattctaaaatgcatctgaaattttgcctagagagtaatatgaatttttggacttgagaaattattttagcactttttaaaaatagagccaacgatttaaattaggctaagtctactggactaaaatcttgatagagatacatcctctaagaagcaaagaagttagttacttgcattgcctgacagagggaaatgttagctggttttctacattctgggccttagttattggcattgccaggttgatgtttcacaattaagacaactttttctgttagtgactgctccttggtgatagattctttaagaaaaagccatcctagaacacataaagcagaaagcaaacctagccttttaaagatactgttaatgttgagatagaattctagatcaacaagtgctcttttctatttctttctcttaatgatacgtttggtatcgactttttgcgtgacatattgcagtttggttggaagttgtaaaggaagtgtttcttgcaagtatgatcaaactcagtttaagcaagagattgaaacagccaacttcagctgcttattcagcacaggccttaagtgccccagaagccgatagtttcttaataataactcttagtgatcattttcttctagaaaattaccctggaaaagtagtataaatagtttaatctgctatttcttaaaattttgtattcctttactcattcaacaaataaatagtattcagtgcttctttgtgccaagcactgagggctcattagtgagcaaaagggatattaaccactgttttaaaaaaaaaatgtatctaacatgtactaaaagccaatggatgtggtgatgcatgcctatagtcctacctacttagaagggtgaggcaggaggatcactttgagcccaggggtttgagtttgtgctataatggtgccactgtactccagcctgggcaacagagcaagaccctgtctcttaaaaaagcaaacaaaaagcctttaatggaactattgttgctcataacggcatactttagaacccctggtctagtctgactgtgcttacctacctgcttgcatgcgtttctctttcttcccacctctcttcccctcccttccttcctttcttaattctcttctgttttttacaactcttttccttctttgagttagtgacaataagcaaattttgaactcatctaagattaggagaaaaactgtatgtgatatttattgtataaaacttgcatggtagagttaaacaggagatgataaaattcttaatttactttataaaccaaatgtcatctcacctgtctagctctcaaggtgggtatgtttgttacttcttccagaaaccatgtctctttaaatgggtttatatcattctattttaaataaaattcgtatgtttttatacaagtgtgctctttagatgcaaacatttatatgattagataaattttccttagtctttctttgattatgtattgtctgaatttgaatcctgatgtgttattctggaattagccatttttgtttctatttctgtttgttatgttacaattagtgtatttcttatttttcagtgctttaattgccttgttatctaaactctagaatatataccagttaattaaagacatgtgtgttttttttttttgcttttgtctttactggcgaatttaaaggtaattgaaagtataattcttgtcttctttagcatcagacaacagtcagcgctttcgagaaacctgttttgcatttgccttgacaccacaacaagtgcagcaaatcagtagttccatgtaagttgtcgtcaagtgtaacttgaagtttgacctttgaatccagtagtctataataaatgattttaaaaaacagtgattggtgagttagtatttgtgtgatgcaaatattagtaatgaaagtatagtgtgttagttactgtaagaacagttatatttatgataatttgaaaaacttttctggagtaacaaggtctttgaatgaactttcatgcaaatactttaaaagtaattgtaattcctattctgtctcttctagggatatttctgggaccaaatgtgacttcacagtacaggtccagttaaggtacagtgctgactataggatatattcaaagtttaaaagataatattccttttcacagtacgggtccagttaaggtacagtgctgactgtaggatatattcaaagtttaaaagataatattccttatcaggaaggggaaatggaaaaaaaattttaaggaataagaggaaatctacctgatttttcaataagtgtattgaaaatattaggtttagatatttgggtgagggaaaacattctcctgttatgagatattctaattttcatccaatttagatttttcccctgcccgcccaccccccagtttagatttcaatatagcaagtcatgttctatatatctaaccatatttgattgccctcagttggttgagaagctccagctaatgatatcttacaatatcatatcaagttttatgaaagcatgggccttatctccataagaggcaaagtactgtggataaggaattagtacttaagtctacagtatgtcatggactaacaaacatcaaaatattctaatttgttttgttctgtattttaaataatttaaatatgctctaatttaggatccatttgagacatctcttaaaaatgttcaaagactaatgggaaattttccaacatggattcacaaccccttattgagtttcttttcttagcccattcatttgtcttagaatatctaagaaatattttgtattatttctctcccttatatatctcccttttatatacatatatatatatatctcccttatataaaccatcatattatgctttattattcgatttaccaacttaaatgtccacactgttggaatagggatggaagagaaaatataagacagttgttttcctcagtaagctgttttccctataattgtcaggaggataaatcaaacagttagccttgtctcaataatcagatactaagttgtatgtacaagttacaaatacactaggaggctaaaaaagggattaatctaaaacgcctgttcagcacttcatggaaccatgtgaaaacctctcatctaagctttgaaataataaggtaaaaacagtgagaaagcagagttgaagtcgaaagttgagttgaagattctaaagaggatatgactatacttaataacttttataccataaaacagtatgacaggaccttactgcagtagactagtgataatctaagtttcagttttggaaggcactgctaaagatgattctgtataaaaggtatattttatgtcggccagattgtgataatgactgaagaaattaaaggacaaaaataagatgtctccatagttaattatgtattgctgtagtcttctttacttcctgcctcaacagtttacattttgcttgtgctgatacttgacattatcctttaaatcagtggttttcaaacttgttgcatggagccacccttaggggttcatactcttctgccatcctcctcttctctcctaaacacatacacagtctgaaccaaagtggggcttcttttatctcttttatctgttttgcatgtttgactctgggttaatttttgcttaaagacagggtcccaagactaaaataaagtttaaaaaccgtagctttagaataaaagatctagttactaagtattttgtattaatatacatacattctttaaagcagcaacaggtgtggtccacattttgaagtaaggttgtctagatagatgagctataattcagagattccaagggtatcttgatgactgctattttaattgaaatgtatctccaggacttggaaaaaaaaaaaaaaaagaaccatgttgtgttatatttggtaattgttaggtggttctttgtgttttaataaaacagttcatctctctccctgccccacgttgctaggtctgcaaccctagtgtattatttaagttaggagtgtatgcctatctgctatcctaattagaaatgtttatctaaagcataaaaataattagttgagaattaggatccaagttttctttattagacacctagtctgttttcatttatgttgtgcctccctgctccactccctcctctctgccccatgaaccacttcacagaaactttctgctattcctttttttcttttttctcttcagttcattagggtgatttagattagttgaatagacactgtcttgtcatttaaattactcttttcctataggaaagggttcaggcagccagggtccatgttttaaattgatcactgcattggaataattatttaaaaactgtgacatccttttaactattgcagcctaaagaattagcctgtaatggaaggttctgctggggttaggagtggtcctgtgagctttgacatctgtttgctaagtatatttctagaaaatctttgtagatcagtaaatcttaacttttttatggatccctgatccctttgagaatttgatagaagctgtgaatggtttccctataaaactgaacatgtatatgtactcaaaataatttacatataaaattgttttatattgtgcacgatccccgtactcagatttcatggccagcaggttaagaccccataccgcaggtgttgagaggagttgttggcacatgaggaatatttcacagatttcggagatagggttctccctactatgtaactcaggggtgctattagcattctataacagtgcaatgagccttaggtgtatattgagaataggtactaataaagaataaatgccttaaatagcaaaatagtaataagagtgaatagactgagaatttatgaattatgtatctttccttgatttttccaaaagactgcatttaatttagaaatatttttataagtttctaaaatagtattctaaatttatgtggctataacacaaataatattcaatatcttcagttctcaaaaaataaggagtactttggcttactgatcctggggatggacttaaaagcattctcagtattttctgctaagaaccagaaaagtgtttcataggcaaataaatttggaaaatactgcatacaggtggtaggtcttcctcttagagatttataatgcttattagcctattaaaagctctgaaaagttctgtattaaggaagcttaatttaattgttttgattcagaatttcttaattttatttgactaacgagtctttttttcttttaacatctgttaatcactgaagaaactagtgcttctcagaacatgcttaaccaaataattggcagtatcacgaagacaactacagggtgatagtcatgattaccacaactctacattgacagaattatttattttaaacctatttacatatacttattaatagggtgaaaagtccagtttttatagttttcccttttggttgtttttaaatttaccatcttttaaatttatctatttaacaataatactaatgaagtcatcctttaataaaggaaattaaacttgtcctttattgtttaggttttgtttatcagaaaccagttgtccacaagaagatcacttcccacccaatctttgtgtgaaagtgaatacaaaaccttgcagccttccagtaagtcctaagagctgttttttaaaattcattgccaacataactatcaaataagtcatcacaactgttgttaaatcatagtttttccttaagaaaacatttttattttggatatatattcattgactgggtgaaacacttgtaccaactatgtacagttagcagcagtgacattagctttggggacataggatttggagttgggtatggtagctttagtgttgtactggattttggggcgaagttttttcaacaaaatctcagctgtgttcatgtgagtctataagcctatggtagaatggagatttgaagaatgctatgtcttaaacaggaggtaagggtgaggactgtttttggtgcccttgaaatactactactcatgtacctatctaagcttgttatgaattcatcctgatttttaaatttaagagattttgaattttcatcactaatagttttctcaggtttactataaggagagtataaggttgtttggaaaaataataacacaagaaacttgtaaatgtttgcttctctactttttaatgaaaacattcatattttctagtatgcagtttgtagggggttttttcttaaggaatggaagtcaaaatgattgtggaaataataagtataaataaattacatttcatttttagggttaccttccacctacaaaaaatggcgtggaaccaaagcgacccagccgaccaattaatatcacctcacttgtccgactgtccacaacagtaccaaacacgattgttgtttcttggactgcagaaattggaagagtaagtaaatttttgtttctaccagatttttgtattataaggaggggttaatcaccatgcctatctgaatttatatgtaaattatgtaaaatgagctgcaaaaggatttatttttgtctcacaatgaattttcaacatgtttccatttgaaaaatgggattatgaagtatccagtgttttataacctggcccttttactccacaattgatcataaatgtcctcctgtatcatcacatgttcttctgcattattttaagtgatgatatcatattccaatatgagtatgccataaatttgcctgttccctactattgagcgtgttacttgatttattgattgattcattggtatgtcaaagaacattttgaagaccatcttagtagctataactttgcatgcatatgataatttccttagggtaaattctcagaagtgggattgctgagtcaaagagcctacagaattttaagaaattttgtgtacattgacagattaccttctccaaaggtgttgtacaaatttattctctgactttcagtgttatttgcgtgctcgttaacactattatcttctttgaaatttttaccaattctgttaggtaaataatgccaccactgtgttttaattagtacttttttcattattactgagattgaatatgttttatatttgtgattacattttaaaactgtatccgtgtctgtttctctattgctgtttttgttattgattatgagatcttcatatagtaaaacttaactctgtttcatgttacaaatatttgtttccagtttgttggccttttatttttatgttatttaatatgcagaatattattaatattatttatattggctacacaaagttttcgtatagccaaaacttaaccagttatttcctttatatagtcttttctcgtctccatcatgctttgcctatctgcccttcccaagctatggaattatttgtttattttcttctagacttccaaggtttcatattttacctttaaatatttagttcatattaaatatatgtgtgatgtgaggtaaaaattgctttctttcactttttaaatagctggttctaacactgttaactaaataaatgttgattctgaagccaccattgttatatatttaacttttacatatcctgagtgtgtttctgatctttttctatgttgtttcttagtctaacattctttttttgggacaattttcatgatatgaactcatatgtatccaccagttcatttgaaatttattgaatgcttaccatgtgtcatctactatactcaaaactggcagtaccatagggagggaaaaaagttcattttcatgaggcctgtgatgtaggggcctggtggacacatacaaagaatgtgaacttacttataagtactataaaagagaagcacatggtgattttacagtgtatcaaagggcactttgaacgagagagagcagtcagggagggcttccctgaggaagcagtgactgagccaagagctgagaaaagagttgcaatcaggtgaaaggttcagaggaaactacccacacaacagcccagtggtaggagtgagcctggtttttacaagaagctgagagggattcactgactagagtgcagagaatggggaagagtggtatatgagatgtggctagaggggtaagataggactaaaccattcagggcattgtaggtaatgttaaagttaaggattttctttttctttttctttttttgagacagagtctcactcttggccaggctggagtacagtggcacaatctcggctcattgtaacctccatcccctgggttcaagcgattctcctgccacagcctcccgagtagctgggattacaggcacctgccactgcacctggctaatttttgtatttttagtagagatggggtttcaccatcttggccaggctggtcttgaactcctgaccttgtgatccacctgccgtggcctccccaagtgtgggattacaggcatgagccactgtgcctggccaggattttctctttttaagcagaaagtttatagtgctgtatttctttttagaaaagatcactccttggagtggtaaatagtttaaatggaggccagaatcgtgcagaaggacatctcttaggagccagctcttgtggaagtattagtgaaatggtatctttgtctagagtggtggcgatagaaatggaggtaagtaggggcatctgcaggattgagtgatgaattgaaagtcgagggctaagagaaagggagatgtgactgatgagtccttggtttctgggtggggggctaggcaaatgatattgctgctgagatagaggaaacactggaaaaggactgagtgtgggtgtgttttgttttgtttttgttttgttttgttttactttgaagaatgggcattggaggacaagatggagaaaatcatgaatttacttttgaaacttttgagtttgaaatgcctgtgagacatcctgaataggcagtggggcagataggcttaaaggatacatttgggctagagggaaaaaatgtgtgagtcatctgcatattggtggttattggaaccacactggcagggctgacattgattctcctgcattactttttttttttttttttttaaacattctttcttccagataaagtagaattactttatcatatttcttttcctcgctcctgtaccccatttgcacatctttctgagaatttggatgagatttctttaaagttatagattaagttagggagaatttatttacaatatttaatataaccattctaggaactgtattttcaaatcttcttttatgttcctcagcaatttaatgggtttcctacaattcctgcatattttttgctaattcccatgttggttgttattattactgctattataaaaagagatctttttttctgttatattttcaaagtatttattgttggtttacttaaaaactagttatttttaatatttatttcatagctaaattcatatattggttctattagctttttagatgatttattggtatttctatgttgacagttttgagttttaggtatgtcatataaattatattaccctaatacttttgtcatttatttcttgttctactacctagaactttgtaaacagcgttaaacaatgcaggcactagtggacatatttgacttgctccttatgttaatgagaatactgctactgttataacattattataatgttgctattaattttgatagaatattatatcaatgatgtatttctatatttctcttactggatttttttttagaaatggattttgaattatatcaaaattctttttgacatctctcagggttatatttttttcctttaactcatatgtcaccattaggtttttaaaatccttttaaatattttatttctagtgtaccttggagttccctttttcctcctttttggggaaagttttgaaaatgttttgtttttgtgtatgaaaagaatagctcaccaaggaagaaggggagtgtttttggtgaaataggaaagaagtctgaaactgtaggagaggaggggaatatggccgctgataaaaagcactagaggaggggggaaatactcttccataggaaggcttccagctacaaagatttgaagacatttttctggggaagtaaaacactaaatcagcattattttccaaagcccagaaaataacttaatagattgtttttaaattactgttttaattcagcttgtgaagatattctgaatagttcatgtagaatatcttactattttgcagatacttttgtataaatagttgccagtgagaaatgttgcaactgtgtcttttcaaatgaagtaaataggagagctagtatagcgcctgaaagaagtaagtgagttatattgtaacttcttgctctacctcagggtaagcactccttttagcatttattaaactctcattatttgtagagaaattatttagatgtaggttgagtattcctaatctgaaaatctgaaacacaagatgctctaaaattcaaaacaggatgctcaaaggagatacttgtttgagcatttcagacttcagattttcagattagggatgctgaactggtaagtataatgcagatattccaaaatctggaagaaaaaaaaaattcagagtccaaaatacttatagtcccaagcatttcggatcagggatactcaacttgtactagtgtaaggggcacataatgaatagagtatatttcaattacagagaaattatctcatgaacttgacaaataatttttaagacttttgaaaaagcaataaacaaaactatcagtataatataatataatatagtataatatatatcagtagttggaattagtatttgaaggattagcaggaacaataaaatactgtctacctagaaaagaatctctgtcactattaagctttggtggggttttttttgctgctgaacctctttcatatgatgtaaaaatttcattttatattaccagtacaagtggcatttgttagtaccacattctttttgctgcttttattttatttttctatttgcttacatgtttcaactagagtgagcataccttttcactgaacttgttgcagtttctgcttgatctcttcttaaatatttatataaagccttagggtaattccaagttctgaagattcaagttgtcaatacatagtttcacattgttaattagcatttctccagtttctgtcatacttgaagcattaagcaagtaaataataatggtgaataagatttttttctaaaagaagctttccagttgggcctggtgactcatgcctgtaatccaagcactttgggaggctgaggcaggcggatcacttgaggtcaggagttcaagaccagcctagccaacatggtgaaaccccatctctactaaaaacaaaaaaaacaaaaaaacaaaacacacacacacacacacacacacacacacacacaaaaattagctagatatggtggtgcacacttgtagtcccagttacttgggatgctgaggcaggagaatcacttgaacccgggaggtggaggttgcagggagccgagattgcgccactgcactnnnnnnnnnnnnnnnnnnnnnnnnnnnnnnnnnnnnnnnnnnnnnnnnnnnnnnnnnnnnnnnnnnnnnnnnnnnnnnnnnnnnnnnnnnnnnnnnnnnnnnnnnnnnnnnnnnnnnnnnnnnnnnnnnnnnnnnnnnnnnnnnnnnnnnnnnnnnnnnnnnnnnnnnnnnnnnnnnnnnnnnnnnnnnnnnnnnnnnnnnnnnnnnnnttctcctgccccaggctcccaagtagctgggactacaggcacgtgctaccacacccggctagttttttgtatttttagtagagacggggttttaccacgttagccaggatggtcccgatctcctgacctcgtgacctacccacctcagcctcccaaagtgctgggattacagtcatgagcccctgctcccggctgggaaagttttaatgttacttgttcctcattaatgtgaaatttattaatgaaggtaaattcgcttttttgacacttctttttcctccctctcagaaaatgtgtagcatgtaaacacagatagctttccgaactttaaataaaaatatgaccttccagagagtattgtagtatattttctgtcaaaagaggggagtgcattaagttccatgtcttaatattcccaccctttccctttggtttctagtgtctgctctgtcatcaagcagttgcctaatcatgagcagattgcataatctttttgtgcctcagtttcatcagcccttcacttagaaaaatacctatcctacctgtgtcttaataggccttgtgcaaagtttaaatgaagtaggcagcgtatgttaagaatgctttgaaaaatgtgtgtagctataaaatacaagatggcagcaattatttttccttttacttcttttcaagtctcttgatcttcctcttgatcccagcaccaaatagaaactgatccttctcatttagatctccttcctacccttcgtgaacctcagccgtcttttctttctcttacccaaccatgtacccttcacttagtcttagcttgttgattaactgtttttttttggttttggcttttcttttttttttttttttttggtccccttctacctctgtcatctctgggtagtctgtctgctggtaatggatattcatctgttcatttgccaaaccagcagcttctgtttgaaaaccttctttaatattccctctgcttgttgtgataatggcccaagtataatcttttcaagagctacttgaaggcatagagaaaggttaaaaggtataaattaggaagcccatctcatttgtcatttaaaaaaaatagatactattttagatatatctgttacctactaaatatggtttatagctttgacatcttattgtctttggcttatacttagtcttaacagtattctttcatgtaagtgccttaaattcattagcttcaagtataggtaatattaaatccaagacagacctgggtttaaattctaggtttgttacttgaaaattgcaaaattagggcaagttcttttacttctctgtacttcagtatcctcatccataaaaacaggtttatgatcatctcagcagctttttggtcaggattaaatgaattactgttcatgaaaacacctaagactgcttgacacacagtaggtgttttaagaagtgttagttttctttccctatcatggtgagattaaaatagatgtactatttacttacatatgttgtttgttttctacatctttttttttccagaactattccatggcagtatatcttgtaaaacagttgtcctcaacagttcttcttcagaggttacgagcaaagggaataaggaatccggatcattctagagctttaagtacgtatgataaacttatttcacttattcagctattttgttaaaggttagagtagtattttctcaactcaagaaattttagaatttgtttattcactggagcctgttgtgtagttcttagagtagttctgatatctttgtcatgagctatattttataatctatattttactaatcttaaaattaactttgtgaagtcagtgcacaaacatggaagaatattattctacaacttcataaaatcaatgtttaaggaattctgggaaatgggaagggcatcttggcataaatttcaagaaagttattttagattggtggtttatccaggaaaaatgtacagaattatatcatggcctcaccccctgcatttacaaagtgaagagagccagtggggtggtagaaataataattctgccattaatcaattatatgactgtggacaagtaacgctgctcctgagtttcatcttcctcatctgtaacaagaagtttatgccgtctgatttctaatgcttctgcgaagtctgggttcatacgtgtgaattactggatggtttgttttgatacgttgaatttgagattcaaggtcttcaaatggggctgtgctgacctctgtttttaagggttaaggtcagagggtttggcctttccaaagaggtgaactaagttcttcgtttattcttttatttgtgagagccgggggctgcgtggatttaggagtgagggctggggacttagaaacaaaacttttataggcaggtgttagatagctatcctttaaggacttttgatgtgaactgattaatgaagcccattatcagatttgtacttaggaacactctggtggaaagaactaagataatagcagctttccttttgtagcatagctattacccctttctgtaacttatttctgtggcagagtaaaagatcccactacccctgaatatcaatatacccttaatagttcattgaagaatttttctgtattaaaatggtcctttaaaaatgcagctaatcctgaatcaatgggagcacactttggctaatgcctctgtaggcatgcattgacagatgatggagacctagaagggcagcactgatttgggatctgcgggagtggtggcaccatttggcagggataagaagatggtagggatcctgaaagaaaagacagacatctgccttgaaggagagtataagataacttgtcttctatcacaatcttgctgaagttattcctggtcattctactgagaatcttcgtatttgcctcacaatactagaatctcagccagtcagaaagcaaagaattatgtgagcctgtatggaagagggaataccaagaaataaggcagatgaagttattttatttaatagtaacagcaacaacaacaataaggccaactgtctttgctcaagctgttaactcttctccgcttgtagctatagcaccacctggagggagagtgggaacgtgagtctggaattgaattattttattttctccgagaaaccactattagctaccattaagcagcaaaaactgtttaattcaaaagctatttctagtctgatatactgatggatgtggagaataattgtacactggatgagatttttgtggaaattgataccttaccttacttattggccagggaagccaatggaatattaatttggatcccaccagtaagaaatttgttgtaatttactaaaaaacaggttatctacctttacctgtatgctgcctgtaaaaaaaaaaaaaaaacaaaaaaccaaaaactttcccaacaaattatgtaattaaaattctgtttacaataacttgacaaaaggaaatgtcaggtattttaaaagagtcaaatcagttacaaatatgttctttgtaagtcattcttaataaaataagtacttctagcaaagttttagtagtcaagccagacactcttatgttcttgaaagaataaagttggtattatttagacttttcacagagaactccattctctgaatcatttgatttagtaggattttgtcttgcagtttctgcctttgtgtagagttgtcccctcacaactatgaaaaacagtcttttaccaactcttaatcaagtttctttctcctcttccttctcccttcagcagttatttcaagccttagccataatctaatcaaacactatccccctctctcagcactctgccaatgcatgaaaattggggctacaagacatgaattacctaaaccacccatttcttccttaatctcagtgccaccataattacttttttagcttatctacatttgtgcccagtcctcgctttattttgttcagtgtcaagaggaaatctccctttccctgcttattcatttattcttttcattcaagaaattgtgttaagagtctactgtgttccaggaacaggagaatataacattaaacaagacacataccatctctgcatcccccagaagtttgcagtctggtaagaaagacaggcattaaataattgcacaagtcattaatgagttaaagttttgacatgtgccttgaagaagatagacagggaactctgtagaggtacaataggggaacgtagtcctctctgatactgtgatacttaaggcaagattataagtatgaggagaagttaagctccaagatgggaacagagtatgccaggagaaaaggccagtgcagctggaatagagagagccaagaagggctgggtgcagtggctcacccttgtaatcccagcacattggaaggccgaggcgggtagatcacttgagtgaggtcaggagttccagaccagcctgaccaacatggtgaaaccctgtctctactaaaaatacaaaaaaattatcctggcatggtggcatgtgcctgtagtcccagctactcggaaggctgaggcacgagaatcgcttgaacccgggaggcagaagttgcagtgagctgagatcgcaccactgcactccagcttgggcaacagagagagacactgtctttaaaaaaaaaaaaaaaaaaaagagagagagagagagagcgccaagaaggagggtgaccagagagttggacaggtataagttgacatagacgatatgaagatagatgatagaaaaccattaaaagatttttaagcagaggagtaaatgacacgattacatttagacaatctgattctcactttgaagacgaatcaaaggaaggcaaggctaatgcagtgaggccagttgagaacctgtttgtaatagtatacgtaagagatgataatgtcttgaactaaggtgatagtggtagatagaagttgacagttttgagaagcattgaaatggcattgactgtgtgtgtggagtgatgagtccaaggaggagtgctaagcttcttactcaagcactaggtaacatggtaatgccatttactgaaacagaaaactgtgttgaaaagatcagattgcaggggggagatcagagtggactgttagacttgtggtgtttgagatgggatgagacatccaggtagagatgcttggtaacagtattatgagacctggctccctcatatatctgctctttgtcctgtgttttcagttcctctctgtctgcaggctttttctgtcactctgtgctgtcaagactcttttatcttttaaaaaataggaaaacaagctcctctatggatagagctctgtgttcctcccattgttctcatcctaatttttgtgagagtagtctacacttgctctttttacctcctcactgcatctcattatggtctttaaccctctatcattccactgaaattgctctttcagatgtcacaaatgatgatctgattgctaaatttaaagtgtatattttcagttttcatcctgaatacttctgctgcatttgatatgaaccactttctccttgaaattctctcctttcttctctgaccatatcttctcaatcacctgccttcaatggattctcttaagggaagcattctaaatgtggctgttcttggagttttatcttgggtgcacttttctacgcacccttatggtttaaaactaacacccaccccaaaatacatgtcttcatctcagacctctcccctgcgtttcagacttatatagctaactaccttcacctaagcatttcactggttcctcaaattcaagtatttaaaactgaactcaccaactcctgtcaaacttactccctaaatatttctcaaatgtgccttctgtctatcatgctatcattgcccttgtttaagctctcatatcctgcttttattttaaaaaccattcttagataaaacatccctctccttgacgcctttttctatctcctctggtagcctcctaagtgatttatacagatctaaaatcttaccattctcattcccttgcatttcatggcttcttaacaccaagggaataaaaactccaagtatgttagcatgacacacaaactttccatcatgtggcacctgcttattactttccagggtcgcctgtattcactctgctttttaaactttccatgacgtggcacctgcttattactttccagggtcgcctgtatttactcttcttttcatacttcacattccattccaaaaatatggaactctttagtctttcttcagtgctttagttttgtgctctatgcctcaaaactcccctgctgccttctctgcctaatgtcattatcctttgtttcacttttttccaggagacatcccagaacccccaaaattgatgagttgacttttggttagcttcctgaacatactccatcagagtgcattagagatgatctcactgaacatctttaccctctactagattatgagttctttggaggaggaatttaatcttattttttttcttgaattcctattgctcagcacagtgccacatacatagtagatctgcatatttttgaagtaaactgatgaaaagacagctacagaaaaaaatcaggtcttggtgcctgtttctttgcttataaaatgaaatattgatcttaatatgtttgattgttttcggccttaaaattttaaaaggctgaattaaaataacctgatattaatgaaggatagaaattatcttgaaataataacaaccccagaacaccagtaatagaacaatctgtgataatggaagtgttctctatctgcactgtcccatatggtagccaccagcaacatgtggctattgagcacttaaaatgtggctagtttaacggatgagctgaatttttatttaaatttaaatacagcgtcatgtgagtagtggctaactcctgtagctcatgacaacagggattaaaaacaagattaattctgctccccaaatcgacttattgggtaaaacaagattaattttaaatgtgactagctgtaactttattatagtcatataataaaatactgttagcactgcagatcactgtaacaatgtgaaaactttaactcccagagaacttcccacatgttgactgattactgcaggacaaatattatatgtcttatttttattttttattcccttgctcacaagtaataagtgcttctacttttactttattttttcttcatactttcttatgattaaatatagcatagtgcttttcccctccgttttctctctttcttttgagaaagttttttaaagtataacttataggcaataaaaattcctttgacagatgtatacaatcatgaaccactgccacaatcaaaatatagaacatcctttaccccagaaagttcatctgtggccttttgcattccatcccatccttttaccattgatgtgatttctgctctgtagttttgtcttttccagaatgtcaggtaaatgcaatcctacaatatgtagccttttgcgtctggcttctttcacttagtataatgcttttgaagttcatccatgtagtttgttctttattgctgcgtagtatttcatttatgtactataatttatccatttgataaatgatggacatttatccatctgataaattgatggacatttggattatttccagttttgcagcaatatgaataaagctgctgtaaacatttacattttgcatatggatacctcagttttgtagacatatgttttcatttctcttgggtaaatacctaggagtgggattgctgggtcatatgataagtatatatggaaaacagtttggcaatttcttttaaagtaaatataccatttttgcattcccactaacaatgtgtgagatttcaagtggctccacatccttaccagcatatggtatcatcaggctgctttattgtagccatcgtgattggtatgtagtggtatttctttgtgcatttttctgatgtctaaggatgttaagcatcttctcaggtgcttatttgccattcttatagcttctttgatgaagtatctgccaaattttttgcccattttttaatgtcatgcttttgatatattatgaaatctttgcctaaatgaaagtcacaaacactctcttctatttttcttctagaaattttattgtttgagctcttggatctaggtctgtgattcattttgagttaatttttgtatatgcaaggtgagagtagagattcattttttcccccacatagatatcgaaatattccaacagcatttgttgaaaagactgtctttccttccatttcattaccttggcacctttatcaaaaaccaattgaccatagatgtataaatctatttccggacgttattcttttccattgacctgtatgtctatccttatgccaaacgagtcttaattaccgtagcttgatagtaagtcttgaaatcagttagaattctccaattttgtttttctttttcagaattgttttgaatgttgttaagtccagtaggtgaaacaatacatggtgaccaaacagaatttatttctgtaatacgaagttggtttcagcattcaaatgctgaaatataattcaccttctcaacaaactaaaaatgaaaaatcatatgatcatctccagagatgcagaaaaagcacttggccaaattcaacatccattcatgataaaactgtcagcaaaatcgagaagggagctgcctcagtgtaataaagagtatttacaaaaagtctacactacagctgatatcatcactaatggtctaaaacttgaatgcttcactcctaagattgagaacaaggcaaggatatctgcccctagcgttgccctagagatcctagacagcacaataagacaaggaaaagttttaaaaaagaaaccaacacacaggttagaaatgaagaaataattatagtctttatttacaaatgaccttatggtctgcatagaaaaagatcccaaagaatctccaaaaaagctactagaaatactatgtgagtttagcagagttagagaatgcatggtcaatatacaaaaacaaattgtatttctgttagtaatgaacaattggaaattgaaattcaaaaaagattttacagtaacatccaaaaatatgaaacacgtggggatacatcacacaaactatgtgcaagatttgtatgccgaaaactacaaagcatggttgagaaaaactgaaagaagacctgcataaacggagagatatatcttgctaagagattgaaagattctattgttgtatgtcagttctccaaattaatctgtagaattaatccagtctaatcaagatcccggtaggaccttaaaaaatatctttacaagaataaaaggactaggattgggtctgtaatggcaaaagagaaggcataggtttttttttttttttaatagaaattggcaaacattctaaaataatttcagaaaattctcccacctctgagagaaagtgaatatataaatcgtgttttattttaagtaacaatagctaatatttattgagaataatattaggctattttaaaactttttttgttgccagcatggtggctatgcccatattcccaatactttgggaggccaaagtgggcagataacctgaggttgggagtttgagaccagcctggccaatatggtgaaaccctgtctctgctaaatacaaaaattagctgagccatggtggtgcacacctctaatcccagctacttgggaggctgaggcaggagaatcacttgaacctgggatgcagaggctgcagtcaaccaagatctcaccactgcactccagcgtgggtggcagaaccaaactnnnnnnnnnnnnnnnnnnnntggcagcaatttcagctcactgcaacctctgcctcccaggctcaagtgtattttgaaactttttatgcatattaactcaatccttaaaacagttctgtgaggtactattattgttcccatttaccggatgatgtaacaggcatagagaggttaagtgatttaactgagactaaattctaagctaggctatccctaggtcctatgctcttaaccactactttatgttgcctctcttatttcaatttattttctaagcactaaacactgagctttgttttgtataaggttgatactatgatctataatattgcttcatttaagtggaaatttaaatatgcaaagttcaaagtcagttactatgcccattgcttgctatgtctataaagggtgctggtgggatggttggtgaaggcatgtagagtggttattagtcagggttctccggagaaactctaggaggggaaggagagggagagaggaaaaggagagagagagatgagagagagtgagttaagaggagatgtattaggggaattggctcacatgactatgaaggctgagaatgcccacaatagataggccatcagcaagctggagaaccagcgaagccagtaatgtgactattgaagtccaagggccacagatccaggaagccaactctcaatctaaggccaaaggcctaagaggggtgaggagaagggctgatatggtggtacaaatcccagagtcccaagcccagagaacctggaattctttctttttaaagatggggtcttactgtgttgcccagactggtctcaaactcctggcctcaagcaatcctcctacctcaggctcccaagtagctgggatcacagaagtccaaaggcaggagaagaagggtatcccagctcaaggaaaaagagaaagtgaatttattttcctttcctctgcctttttgttctttccatgccctccagctgatttgatggtgtccgccaagattgagggcacatcttcctcactcatccacagactgacacaccagtctcctttggaaacacactcgcagacactttcagaaattatgccttgccagctatgtaggtagcccttcgtttagttagttgacacctaaaattagccaacacagtgagtaatcacattagaattctatttgcatgtttatttcatatggcgattatttgttgcctttaacaaagatactactttttaaaatcatatttataagaaaggattgactaagatttggtgtataatgacaaaggcatactttttgtaatttatatatggtattcattagcatagtgttacaactatattttccaaactaaaaaccagaagttgtatgccttttttgtgtgtcaggagacagcctgtgaaatatattaagactttgaaaatttggaatttccaggccatgaaatgactttttagtctggcattagaatcatatctggagcttttaaaaaactaccaattggtgtccctcttttcattctgattcaggaagctctgtaggtaggtctgatgtgcaccttacttgagatccactaatttatggaaatagttggataggatctccaggatttggaccatctaaaaaaatccagactaaaatccaggggactgtgtttaataaaggtaggatttctcataaatggttatcagaacagtagactctgaaattgtaacttacccgagtacttctccctctcttcgttttcttttctatatggtgtcttatctggtcacacttagttgtaccacagctcagaacttctgttgactgtgtatacagctacccaacttacggcccctttgtacaatatagactttaaagttattatgggacagtttctaaaattgttggaatattacatatatgtatttcctgtctcaccccctataatgttttttcttgttactgttattgaagttttcagaggtaacagctaaggtttccagatgagaagtataaagagtctttcatatcagactgaaagagaatgaaagaacagccttggaaaagtaaaattactagtgtctcctcccttaagaaccataagaagtttgaagtgaaaagacttaaagattatctagtgtgggttccaattttactacaagtaaaattaagctgagaaaggaggattgacttgcctaagagggcacaagtattttatagagaaatagattaaaattcaaataattgtatagttaaaaaaaagaaataggactcttttcataatttgaagtttgaattaagctgttttacagtaaatatttttattttctgagctttcaaaaatgtataaatgttattcttattattaatgtcctcgaaagtagaagagcccaagtaatattagtcatagtttaaaagaaagaaaaccttgatccaatatcttagagttataaaagaaaaagggtctaccattagttgaatatgtcaacatattagagaaatttctctcatattgctgcaggtttttgtcccctgagtgagaaataggaaatttataggaaacatagtcattctacagataaacaattgttttccatcctttgcttatagaattaaaagccatatggttgtttttatctttccattcaattgattgggaaataattgaacagatttgtttaagctttttattctttatagtaatgctccagtaatgtatctttaataaaactctgtttgctttttttcttcttcttcaatgaatatcagttaaagagaagttgactgcggatccagacagtgaaatagctacaaccagcctaagggtttctctactatgtccagtaagtgttaactattacttgctttccagaaagtttaacatacattttctctttttattaagtatttttactatttgagaaattctgtttgcttctaaaatatgtccaccattgttacagtttatgaaaagtggaaagacatctaggcattgcatttggaatctaaacaagtctttaaaaatgatctactcttagtaagacatatctaaatatggcctgtgattaatgaccatctctcaggctcaagtgtaaaatctcaaaataagaaatgtttattgtctcagtgtatttataaaaattttacattatttatttttattattgttatttttttgagatggagtttcgctcttgttgcccaggctggagtgcaatggtgccatctcggctcaccacaacctctgcctcccgggttcaggcgattctcctgcctcagcctcctgagtagctgggattataggcatgcgccaccacacctggctaattttgtatttttagtagagatggggtttctccatgttggtcaggctggtctcgaactcctgacctcaggtgatccacccgccttggactcccaaagtgctgggactataggtgtgacccaccgcacctggccaaaaattttacttaagatagtacctttctgagtaaaaatctagccatgattacccacacatctcatttaaccattttgctaacaatgaccacattataacaattcaccaattaaaaacttctgttcagcctaaatgctgaatttgttatacatataaaaaaaccttgagatattttaagccagaaaatgaggtcagaatcaatcattttcatgaaataaatatatggtcccaagacttagccaaattattaaacctgtaagggaaaaggtctcaaaaaaatgttatactaatctgatgttaggctctttggtaggggtggtggttgaatatggccatatgaaaatatgtgaaaaatttaataattaattaccttgacattttggttactttttgttctataattaatcaaactaatcatattttaaattggggagaaagaatgaaaggacatgtctgtttcctgatttgtctgattgttcagacaggcctgatattgaaagcttttgatactgagatcctattaatctcagatgatgatgaagttactgtattcttaaagaaacaaagaatttaaatagaaattaaatgttatttgtaattacaaatattagtcttttgtaatttatgaaacttcaaacatgaaaaaattagatcatgaattagtttctgtaagttatagaaaaaaatacaatgaagttaattaaaatcatcaaattgtatcattgtgtatatatctttctattcctgtaacgtttatttttattcctttttataataaagccaatttttttcttgtgaaaaatattttgactccaggctttttatattagtgttaaaaattctttaagtaaccaggtaaatgttataacagcctaggttgtaaaggagactggtgtgggtttttgtgtgtgtggtttttttgtttttttattttttttttcttttcatgcttagaaaaatgattcacagactggggaagtagagggtgagaaaaagacaaattttttttttaaagaaaaaggtaaaaaggtgtatatttattctaccctctttctccgaaaccctgatttatccattcccccatctgttgttctttgccgcctcattttgttgtaaaacaccaattcagaaaatacgtttagaaaagtacatacacttcattttccatttaaatcactggaaaaagtattgtttttctgcaatctcacttaaaagtgtttatagttgtactaatatatatgatgctttatgtttaacacatatatgaagcatttattcgtataaataagcacagtaatataaatctttgaagttttatttgtggaactgtgtttcaattctgtagtgcaggtgctcatctctgtattactagaaactattaatcacattttgctctttgcacctttatttattttcttttttgagacggggtttcactttgtcacccaggttggagtgcagtgctgccatctcaggtcactgcagcctccacctcccaggttcatgcagtgctcctgcttcaaccccccaagtagctgggactaccggcatgtgccaccacacccggctgatttttgcatttttttgtagagacaaggtcttgatatgttgcccaggctggtcatggactcctggcctcaagcaatcctcctgccttggcctcccttgggattacaggcgtgagccaccacacctggccagcagttcattttaaattgacatctgctttaaaaattcagattataaaacaaaacaactatatatgtatattgtgtgtgtgtgtgtgtgtgtgtatgtgtaaaatgtataattataatactttcatgggtttctatttggctaaagggataatcccttacagttattctgaaatagtaagatcatgtattttaggtatgtttttactcaaaaataaaatttaataatacctatatatcaaatttatgggataataaaagagatttgtgctctttgaaatatgtaaatatgatgtctcactgtgcattacagttgcccttgtgatgtacagagctcaaaataaatgagtttcttttgtttctgtgccatttagctaaaggcaacaaaaataattaaaaatgtttttactctttgggaattttatggttctgatttattaaaaatagaggtggaggaatctttgaaaagctgctttgtaaacccaaatacaaataacgtggaattgatagaagaaaagaagataaactctggaaatgtatttatgaaatatttattattgtgaaaaaaacttgtgaaattattctttttgttttgttttgtttttgagacagagttttgctctgtcacccaggctggagtacagtggccagatcttggctcactgcaacctccacctcccaggttcaagcaattcctctgcttcagcctcccaagtagctagaactacaggtgcacgccaccacgcctggctaattttttgtatttttagtagagatggggtttcaccatgttggccaggctggtctcaaactcctgacctcaggtgatctgcttgccttagcttcccaaaatgctgggattacaggtgtgagccaccactcccagcctttttaaaattttattttttgagacagagtcttgttctgttgcccaggctggagtgcagtggtgtgatctcagctcactgcaacctccacttcctgggttcaagcaattctcctgcctcaacctcctgagtagctggtattacaggcgcctgtcaccacgcccggctaatttttgtattttcagtggagatgaggtttcaccatgttggctaggctagtctggaactcctgacctcaagtgatccgcttgcctcagcctcccaaagtgatgggattacaggtgtgagccactgtgcccagctgaaattatttttaatgtcacactttttcctttccttttgcaaggaaaaagcacgttttattgacatttttagggctttttaaaaatataagttggttaaaacttttatctagaatgttttctcttgcagcatcatcagttactaatatagatagcactattattgtaaagttagtggcgttagaaaacacatttgggagttaaagtgcttatttgcaaataatgcaaacataatttgtgtcctataaagggaaaggaagaatttgtaatcacaagatgaagacgttcaaagctcagcttctctcttgttaccaagttagagaaaatcgatatctgtttttcagataattatttagaatttagtgatttttttaaaaaaaatcaggaatatgagaattatcacataatagttattttatgattctaaggcatttgtgtggcagctaataatgcatttgaaagcgagcttttgctttcacatacccatttatgtctgtcttgtaccatttctgtgtcagcgttccttaaaaactctgtaggtcaccttgtcagtatagctgaagataaaggcttgagagttgctctcttgcctaaaagatatgaactgacagctggagatcatggggtaaaggtatgtgagatgaaggcctttggaaaacagctgcttttcagagtataaatttcatggcctgtagcttggattctgaaacaatctttatttcttatcatcttatctgttgttttcataaacgatcagaagtagtctgatagttctacagttcataaaccttgtgtactattactgtatttctctagaatttttagtctgtggtttctctacttagtattaaggcaatagcaaaagtaccttataaaataggaatttgtatttcatagataagctaaggtctgacataagatctaaaaacgtaacttggcaccaccaaccagattgctatttggaaaatgtttctgaactaatgcaacatggtatcttgcctaatggtaatttttctgttataataactactttgttcttttggcctttttatcaggtgcttatgtaaatcaaatcataaaaaattggctgggcatgtcgctcacgcctataatgccagcactttgggaggccaaggtgtgcagatcacttgatgccaggagtttgagaccggtgtggccaacatggcgaaccctgtctctactaaaaatgcaaaaattagccaggcatggtggcacctgcctgtaatcccagctacttgggaggctgagacaggagaattgcttgcgagactgtttctcaaaaaatacaaagattaaaattgagtagaaatgcagtaagggagtctaatgaagctgtttaatactttgtgagcccagagtaaaagaatgactactaagctgaggtttgggtgggtctcctagtgtacaaagtgatttttaaagcaaatatgtttctgtactttaattaatactactgttatttattgaaaagttactatgtgtcaggtactgtgtagtaaacgtaattgaatccccacaatcatattgtgtagatcccatttttatccccattttacaaaactgagcctctgagtgattaagtaaaataacattcagaattcacacagtaggtaggtagtggggccaggattcattctaacaccagaactcatactcaggctgcactataaatgactgagtatgacctgcataccttccatgagtggtgcctcctggaattgcccatcatgcagaactgaagccttatcagtgcacaggactgtcttactgctgtatatttccaagtatgggaacaaggaaattagtccaacctgtttctagtaggaggagacacacataaataaataacaatcagttttgcatgccttaatgatagggataccttttgagaaatgcactattaggggattttgttgttattcaacaaaagcatcataggtgtgcttacacaaacctagatggtatagcttactatgtaccttggcctattgctcctagtttgcaaaactgtacagcatgttacaaaactgaatactgtaggcagttgtaacacaatgctaagtatttgtgtacctaaacatagaaaaggtacagtaaaaagtataaaagatgaaaaatggtacacctgtatggggcacttactatgaatggagcttacgggactggaagttactccaaataagtcagtgagtggtgagcaaatgtgaaggtctaggacatcactttacatcactgtagactttataaacactgtacactttggctacaataaatttaaaatatttttctttcttcagtaataaaccttagcttactgtaactttttttttgagacagagtctccctctgtcacccaggccggagtgcactggtgtgatcttggctcacggtaacctctgcctcccaggctcaagcgattctcctgcctcagcctcccaagtagctgggatcccagacgtgtgccaccatgcctggctaatttttgtatttttagtagagacggagttgcgccatgttggccaggctggtctcaaactcctgatctcaggtgattctccctcctcggcctcccaaagggctgggattactggtgtgagccaccacacctggccactgtaacttttttattttataagctttttattttttttaacttttgactcttgtaataacaacacttagcttaaaacacaagcacattgtacagctgtacaaaaatattttctttctttatatccttattctataagcttttttctatttttaacattttttacttttattttctactttttaaacttttttgttaaaaacaaagacacaaacacacattagcctaggcctgcacagggtccggatcatcagtatcactactttccacctccacatcttttcccactggaacgtcttcagtggcagtaacagacatggagctgttctctcttatggtaacagtgccttcttctggaatacctcctgaaggacctgcctgaggctgttttacagttaacttttaaaatatatataagtaaagggagtacactccaaaataatgataaaaagtatagtaaatacagaaaccagtaacatggctgtcttaatttgaagacctctatcgtatatgcggttcagtgttgaccaaaatgttatgtggtgcttgattgtaatcatatgcaggagtgtagagttgggagtacacagaagggagttaccagtttttactctaggtccctccaggttatacttctgatactgtaaactggcattgctctagtctcagtaagtttatagcatgttcagtgttctatttttattcatcatggctacatctggttgaagtaaggaggaaatagtgttaatttagagaaagtaaaagaggcccagaaaggctaaatgcctttcttagagacacagtaaatcatcggtatcaaagcaattattttgggccccaaatgacagttaatttcctggtagactaggaaatttcacatttccctgaaattgatctaagtaagccaagaatcttttcctcatttaactcatattcttttcaagcctttatatttttctttcatatatatttttttcttttatatgttttatatatatataaaatactttaagttctatggtacatgtgcacaacgtgcaggtatacatgtgccatattggtttgctgcacccgttaactcatcatttacattaggtatttttcctaatgctatccctcccccagccccccaccccaagacaggccctggtgtgtgatgttccccgccctgtgtccaagtgttctcattgttcagttcccacctatgagtgagaacatgtgatgtttggttttctgtccttgtgatactttgctcagaatgatggtttccagcttcatccatgtccctgcaaaggacatgaactcatccttttttatggctgcatagtattccatggtatatatgtgccacattttcttaattcagtctatcattgatggacatttggggtggttccaagtctttgctattgtgaatagtgctgcaataaacatacgtgtccagtgtgtctttataagtagcatgatttataataatcctttgggtatatacccagtaatgggattgctgggtcaaatggtatttctagttccagatccttgaggaattgccacactgtgttccacaatggtgaactagtttacagtcccaccaacagtgtaaaagcattcctatttctccacatcctctccagcacaagcgtttatatttttcaagttcacaaatcttttcctggtacttggcaaataatgtggttattgaaagtagataacttctctgctatatggtggccattgtgggatctggggactctacagtggtacaagctggcttccagggaatgagatagtgatgtggtacctccctgtgcaggtttctgcgtggcttttctgccttgggctaaagctagcagctcagggaccagatgaagcagatttcctcttcctggatagactcaacccgtgttagctgaagcaatatttgcagggcaagaagtctcctgacatgctggagatgctagaggtccagggctgtaggctgaattgctcgtgatggttcccagtgaggaagcaatgcagagtgtgtgcacctgccttcctcctcagagctgccacttggcaattatgccaaacatcatggggaatgatcactattgattcagttttgtcctgtgaactactttcattcatagataagactgatagcaaatatcaatgcatctctgtattgtgcagtatttaatagggcattctttattttccctaatccctagtaaggtggttcttaaattttttttggatcaaggactgctttaagaatttgagaaaagccgggcacagtggtgtgcgcctgtatccccagctactctggaggctgaggcaggaggattgcttgagcccaggagtttgaggctgtagtgtgctacgattgtgcctgtgaataagagttggcacttcagcctgggcaatatagcaagaccccatctgtttaaaaaaaaaaaactggtgaaagcactctctccagaaaaatgcacacacgaaattttgaatgtaattcaaggggtttatgaccctctccaccaaaagctgatctgtgagctgtggattttagtaaataacccttgttgtagactttccatagtcattttgtttgatagccaaagaaatactgtcattttttaacctatggatatttcacaggaaatgtgtttaatgttcttctacattgatgaaaagtcaacactgtatgctttaaatcagcatgcctacctgttgtgttctaggaaatttttgtcaaagcttaaatgttgaatagcaattatctaatatttactttttctccctttttaaagcttggtaaaatgcggctgacaattccgtgtcgggcccttacatgttctcatctacaatgttttgacgcaactctttacattcagatgaatgagaaaaaaccaacctgggtttgtcctgtctgtgataagaaggctccatatgaacaccttattattgatgggtatgttactttaagtgtttttggtaccttgaaatgaccatatattatctgggtttgttacacatcagatttgggatgaaaattctaagttatatatttgtaggatttttgtgagtctgcaaaccaatattttcaaagtaatttatttcaaattagtgttatgaatattttatctttttaaattgatgttcccttggtttgaaaatgcgtgtgttactgtcagtgcctcctggcatttgtcgttgaaagcactggtgcttttaagcagggtgtgcttataccttttccttttcctgtcattagtccatccatccctagatatgcagaccatattggaacaagaatgtatggggaaatttgggttaactcaggttcatccaaaattgggcttttcaatagaagttagcctatttctggagattagatccaccttcagtcatggtcttctttttcttttttgtcttgcccacctatagcatcacaaaaccaattattgcttttaacacctctttgttttatctatcctaccagacatcttggaatgttcctctaaattttcttctattctgcagcccccttttcctcctgctttttgccactaaacaaaaacaaattgtgaaaaggaggacatctccttgatttttttggggatggggggttagagacagagtcttgccattttgcccaggctgctctcgaattcctgggctcaagtgatcctcctgccttggcctcccaaagtactgagattacaggcatgtgagccaccacacccagcctctacttaatatttcctgtactttctagcaaaacacttaaggcaacttacctgtagtatttaagaaaacataggagcctaaaggtggtaatatcagaaattaagtatatttagcaatacaagtataacctggagcttgaaagatgtcagaccagtcatgggaaacaaacaaacaaacaacatgtaacttaaatgttttatgtttaatttttcagaaatgtcggtgatcacttactagtaaatcagaattaaatagtgatattttccaactttatatgttacatagctttaggttctcccatttcttgttataaaagccatgtacacacatactcttttaaagaaaaattggaaaacacaggaaaataaaaagcttttttcggtatatgattttctgatttttgtctttccataattgtgattgtacactgttaataatttttgtcctttggtttcatttaacattataacctaagaatttggccgtaattaattttatgctttctttatacatgtttttaaatgtctgtcacggtattttatcaaagagatttaacctttgattacatatttgtatatgttttgctttagtttatcaaataagacatgcttattgtgggcaatttagaatatgcaaaaaagtataaagaagaaaaataaatactcatgaaggtatcacccagaggtaactactgtctatatactactcacacagaattttatttttgaaatgaagctttcttttgttgacgttttctcactttttgtgaacattttcccatatgattaaaaatctttgaaaatgtcatttttcatggtcacatgatattttcttacataaatgtgacataaattaggcagctatattcctagttagtactagattttaagaataaatataacttaagttgttcaacctttatgttcatttaaaatatattctaaggatgaattgttttcttatagcttgtttatggaaatcctaaagtactgtacagactgtgatgaaatacaatttaaggaggatggcacttgggcaccgatgagatcaaaaaaggaagtacaggaagtttctgcctcttacaatggagtcgatggtgagtagttcttcacaaggaagaggcagtctccctactgctctaagtctggttttcaatattaaaatccatatatttttaaaaatcactgagcagtttgtggatagcttaataattcctattaacttattgattaaatgttcagaagtaatagaactccttttaaattcacttttttgccagctttaaaaaatttactgatataagatttcaaagtaatgtaatataattagtcatttgtaaactcatacttttgaaactgtaccctttttaaatttttaacagatttgatacagagtagtaaaggttcttttttcatttatttattttttcctggcttttagtatgtttttgctgtaaagacactatgagttttgaaaatgctatcatcgtatttaagtatgtcagatactatacagacaaaaattaatataccgtctgctctcaaattacttttcttctgaagtggacatatgacacattttgattgtttgctctaattcagtaatttattattttgaaaaataatttactattattaaataatagttttaaacttagaagaacagagccactgttggttttctactctctggctccaacaatattgtgaatctaaactgtaactgataaactgtagtgacactgagaaaagagagatgtcatagctcttcccttgccttgtattttaatcattcccatataggatgcttgagctccacattggagcatcaggtagcgtctcaccaccagtcctcaaataaaaacaagaaagtagaagtgattgacctaaccatagacagttcatctgatgaagaggaagaagagccatctgccaagaggacctgtccttccctatctcccacatcaccactaaataataaagggtaagtgctgagacatttaaaaaaaaaagtaatcatgaaaattaacttggcaaatagggattaaagacttgccaaataaaatgattcttgattgtgaaacttaacttagcaatcaaagaatagtttgaatttttcccaggtttgtaatactctggagggattggggtaatgcaccaaaagggtacttggatatagtattcttcatatcaaaagatcattctagtaccgtggttctcaaactgtggtgtacgtacatcagaattacctgagagcttaataaaatgcatacattgcgcccccatgtctgagtcaggagtagagactaagaaaatttgtctttctaggccaggcgtcatgtctcatacctgtaatcctaggactttgggaggctgaggcaggtggattgtccaagctcaggagtttgagaccagcctgggcaacatggtgaaacctcatctctactaaaatacaaaaattagccaagcgtggtggcatgcgcctgtaatctcagctactctggagggtgaggcaggagaatcgcttgaacccaggaggtggaggttgcagtgagccaagatcgtgccattgcactccagcctgggcaacagagcgagactttgtctcaaaaaaaaaaaaaaaaaaagaaagaaaaaatttgtatttctagttaagttcccaggtgatcctgctcctgctcacaggatgtagaacatttgttcaaactggaatgtatgctgtaaaattcaccccaagttgagtgtttcaagtggaaagcagaggaagaccaatgatttaaatctgcttcagaatgtgaatgaggctggtagtgaatgacttctgttgcagcacacaacatttcccactttgcagagttttctcccatattttccattagtcttatatcaataacagtgtacctaggttatacttcagttcatgaaacattgttatctactttgtataaaacaccctcagctaagcatggatgataataaaatgagtaagtacagtcttaaccttaaacagcttagcactttctggggggtggtaaaacaagtagcatactccaactatactctcaaaacaggctgttagtcctgtagacacatcagggattctgagcaagatttctaattgtgctgaagcacaattgtagcacactaattgtaaatctagaaatagatgtgtccctttttaggtataaagcaggagaatcacatggcctgttgcaactgaatagaagctaaccagaaactcttccagcaagcattagggactaaagaaagaatgtaggagagagaaggaagtccatagatggcattgttacaacaccagatcaagagcaggcatttctgtgcctggagtcaaatcattttcaggtttgacattgtatgatgagattaaagatttctatcagtttgagaccagcctgggcaacatggtaaaaccctgtctctaccaaaaaattagctgggtatggcactgtgtgcctgttgtcccaactactcggagggctgatgggggaggatcacttgaacctgggaggtggaggttgcagtgagctaagatcgtgccactgcactccaacctgggtgacagaatgagaccccatctcaaaaaaaaataagatttcagtcaaacatttcacacatcggtattttcattctacagtagtccatcttggcatacagacagaaacaaagacattaaaaacagtatcatcattctaaacaaagtgaataatttaagcacaaatcctactgttatgaacatgacctctgataaaagcctatcttgatggctataacccagcaagcctgaccttgttattacaccaatgtattttatgtctgagtaggagaaaaggaaaagtcacattacctaaagttagaacaagtatctatagaatttcaattccaagatattttgtaaatatcaaaccatagtatgaccaaatacacattgtcatgtgatttttttaagtgccataatcacaattttaaaagatatttcataaacctctggatatataaatacttttgggctaaatgcatcataatatatatatttgttctgttctttagactattaatagtaatatgtatttatgtaaactatgcaatagtattactgactatatattttttctttaaagaaaacatttgagtgtttaggaatctaatatttcttctttggatatttactttgctctttctccaaaaatatttggagaaaataaaataaataatgtttattatgtttggaaaattacattaaatgcattaagtacttcctgaatttcccagtgactaattgaacccagctatagtatttgcaaatgccagacatttctctctctatttgcagataaaaacaagaaacttgaaagtttacatccttagaaggagaataacacaccatagtcaacactagtagccattttataataatgactagttggtaactggaaacctcagtacagcatattgtgtttgttattgtgcagtataaaggttgaaatgcatttcaaaacattatcacaaattgaaagaaaagcatgcagccaggaattagaggcaaacactaaatgtaaaacattttgttgtctttagccactgagtgcttaatgttcatccagaaattgtctatgctgtttgagatgttttcaaagactagcattttaaatcctctcttataatctcttagacattgtgagaagactcagctaatggtaaatggtactttttctagatataagaggtttaacaaagtttccattagatgaaacatttttatgaggcagacgagagtgtgttttatgcttcatatcccattcattaaaatgtggtagatggtcataactggaactctattcctagaaatccaaccttgtcatctcgtgaaatgttctttttttttttttttttttttttttgagacagagtttcactcttatctcccaggctggagtgcagtggcaccatcttggctcaccacaccctccgcctcctgggttcaagtgattctcctgcctcagcctcccgagtagctgggattacaggcatgcaccaccatgcctggctaattttttgtattttttagtagagacagggtttctccctgttggtgaggctggtctcaaactcccaacctcaggtgatccatgcgccttggcctcccaaagtgctgggattacaggtgtgagccaccacgcccggccctcttttgaaatattctataccactgaaattgcatccccatgccccaggtactttacatgaagcattaaaagcaaaagacagcctctttattgcttcctttctctttattttctataacacatacaccttcagcctcttgtattgttggggtaacatataacccttatgtttccttctaagagggctactataattgtttttcttttcaaaattagctttgtttttgtttttgttttgttttgagacaggctcttgctctgtcacccaggcttgagtgcagtggtgcaatcacggctcatgcagcctcgaccccccaggctcaagcaatcctctcatctatctcccaagtagctgggactacagatacgtgccaccaggcctggctaagctttttaatttttcgtagagacagggtctccctatgttgcccaggctgggcaacttctgggctgaaactatccttctgcctcagcctcccgaagtatggggattacaggaatgagccaccatgcctggccccaaagttagttaaattattattttttccttcttctccttttttcctttcccttaattgttagtaaattttaaaaaaaaagctacttagctatttaaacttttcactgttttttagagtcctaattcttgttttatgttttctttttccagttatactgttctctctttaaaaactctccactacctattcgttttggagtatttcttcttgtttcactacattagattcagcagggcttttatgcaaacaatgtgctgataactgtactgggcattgggtatactaaacaatacccagtttttgccctcctaaagattacaatctgaggggccagctggtaactccgaaccactcagattgcttcattccctctgtcttattatatgtattttctttgctagggcatacgtatgcttcttaatagccaatactctggtgttgttttaaaagggtttccgactttcatttgatgtaggtatctttcactcatatcccgttaaagtggctcaactgtacctttctcttgcattttgaaagcataggtgatgatattccaaaggcaatgtgaggtttgtgaatgttggataccattgcatctgtccacttcttcctgtggcctctgttaaatgctattatgtatacaaattattttctcataattgtgtataatctaaattatacattgctttgcttggttttgttcttatttccagcactaaaccgagggttcattgtgagatacaacccctttttttgttaaccttgagagtttaactggctaatgaaaactatgccaatctttccttcttccagcattttaagtcttccacatcaagcatctccagtatcccgcaccccaagccttcctgctgtagacacaagctacattaatacctccctcatccaagactataggcatcctttccacatgacacccatgccttacgacttacaaggtgagtcactggttcttctacattgtcacatagcattatgaatgcctttgatctatataattctcttctaggtgaatctaaggaagaactggaagactgagccaacagggccttggacccagggaactgagagaaataatatgccgttgttataaatactgacccagttcgttgattgtactgtcatcagtagccagtgttttactcccagtggtaaaactagtgcaataatctttagtttttgtgagctcctgagtactctgcaaattgtttttgaatgactgctagtatgtgggtttgaattttggtatttatgaacattatttttttttgccgtggggaacggagtcttgctctgttgcctgggctggagtgcggtggcacgatctcagctcactacaacctccgcctcccaggttcaaacaattctcctgcctcagcttcccgaccgagtagctgggattataggcgcccactaccacaccaggctaatgttttatatttttagtagagacagggtttcactattttggtcaggctggtcctgacctcgtggtcctcctgcctcggcctcccaaagtgctaggattacaggcgtgagccaccacgcccagccctgtgaacattatttattgtaccctgactttagttgtaatgcaacaggcattgtgggtaactatgttgtattatgttttagataatggtgagttgagacatttgaaagttttagtttttattctaatgaatttgatccttcttaaaaattttttttttaattttgtgggtacatactaggtgtatacatttatctgatccttctttttaaaagctgtttgaaatgtcagtatactcatttatatattttgagttcataataatcatttatattatcaaaaagaattgtttttatatctttgtagcataataatttgaatattagtcatataatctaagaacttttttttattaaaaaagccatatatgctcattgtagaaaattcaacacagaaacataaagtgaaagtttccctctacctatcccccaaccccattcccgggaagttacagctagtgtgtgtgtgtgtgtgtgtgtgtgtgtgtgtgtgtcggagttttgctcttattgctcaggctgcgtgtgtgtgtgtgtgtgtgtgtgtgtcggagttttgctcttattgctcaggctggagtgcaatggcgcgacaggcatgtgccaccacgcctggctaattttgtatttttagtagagacggggtttcaccatgttggtcaggctggtctcaaactcccgacctcaggtgattcgcctgccttcgcttcccaaagtgctgggattacaggcgtgagccactacggccagccagttacagctgctcttaacggttagatatctttctatacctttttttctacatgtatgaaacgcactgtcactatcaagaacaacagtgctatgcattttgtaagccttcgtgttgtaatcggttataatgtagacagtgagtagatgcccagagtatctgtggtgttgtaatatatttatctatagctgcgtgttttacctttccccaagtttagatatcataatgaagcatttaattcatgcttgttcacttgctcttcatcgcattacacactgggtgatctagaaaagaatgttaattggaaggggcctccttgcagtgaatcctcagcagccaggtagcagaactactccttcttatgtaatagtagccagtttgcaggcactcaaacctcttctcccctcatgccactgcagtctgtcagttgaatctgatagcaaatgagcaaatttaagaaagaaaaatcagtactacaacttacttaacctaactctttcaacttcaaactttctcacctgcaaaatgagggcaaaactaattacatacctcatgaagtgcttgtgaggagtaacttagagcagattgaaagtttccttaagaggagtccagagcatttgttaaaagtactatgcccgtttaaggatcagtgttagatctgacagagtagtaatggccccagtcccccaaatggggtcacggagaagacaaatcattgccaaagcttagttttcagccttagtaatctaaagaaaggagagacgtaaaacgtttagctcaactcttcatgtttaaataaaattctgagtgacatagcatataagacttgtatttgtttttgaagtattggggcatttggaagagtttttccttcttttttttttaaactgaaataattttttcttccacaggattagatttctttcctttcttatcaggagacaatcaggtatgttatgaaaaatttactattattttaattgtacattaaaaatacagtcatgcgccacataatgacattttggtcaatgacaggccatatatgcattccataagattataatggagctgaaaaatccctacatcaattatagccatggtaacattgtagcacaaggcattactcacatgtttgtggtgttgctggtgtgaacaaacctatgctgtcagtcatgtaaaagtatcacacgtataattatgtacaatataacgataataaacaactctgttactggtttatgcatttactatattttttattgttattttagagtgtacctctactttttttttttttaagtttgctgtaaaacagtgtgccatgttattccaggacagcctcatacatcccagtttgccacatctcttgattgcatcatttcctcttgtgcttgatgaaaatcttgtcttgttttgttcatcatggcccctaagcatacaaaatccacagctaatgttgccagtaagaggccacatcgagtgactgacatggaaaaaaattaagtgattaaggacgatgaaagtggaagatcagtgatagttattgctcaccagtcaggcagtcccattctaccatagctacagtcttaaagaacaagaacaaagtgatagaagctgttaaaggatctgctttgttcaaggcaacaagactaacaaaaatttgagaagggcctgtatcagatatggagaaacttgttagtgacctggattgaagaccagacacagaaacatatccctctcagcaccataatgatcatggccaaagcaaaaagtttgtttgcaatgcttaaagaaaagactggacccaactacagtgttaaatgtactgctagctccgggtggtttaaacgattgaagaatcattattcattatgtaatatcaaagtgagtggagagtctgcaaatgcagatgtgaaggcaactgaagaatttttggaaactctagataagctgattatgaaggaagattacttgccagacaaattttcaatacgcatgaaacctccctattctggaaataaatggctgaaaggactttcatccataaagaagccaagtcaatgctagatttcaaggcttttaaggacaagataacagtcttgcttggggccatattgcaggctacaaattgaaaccctttgtgatctggcacagtgagaactccagagccttcaagcatgtcagcaagcacacactgcccgtgtactacaggagcaataagaagtcatcgatgacccagcttttcttccaggatgtcctcccgaattgctgtgccagcaaaatggagaagtactgttgagagagtaacatacttttcaagatgatgatttttgttgataatgctcccacacatcctcatttcattggtgatcttcatcccaatatcaaagtgttgtgtctccttccatataccacctctttgatccaaccaatgaatcaaggagttgtagcagtttttaaggcctattaaaagatcctaaggaggatctttgcccaggctattgctgcaactgaaaaacaccgagaggacactgatgcaattctggaaggtttacaacagctatgactgcatcaagaaccttgcttgggcatggactgatgtcaccaaggagtatgtgaatgacatctagaagacactgaagaagtttgttcatgacttcaaagaatctgctaaggatgaagaggttgcagaaatggacaaggctgtggttgacatggcaaacaactttaacctagatgtagatgaggatgacattgagaagctcctagatgtggttcctgaggaattgactaatgagctgttggaactggaacaggaacacgcagctgaagaaggtgcaagagaaaaggaaactgcaggagacaaaaaggaagaacctccaagaaaattcacagtgaaaggtttagcagaagcttttgcagacctcaacaagctccttaaaaaatttaaaaacatgggccctggctgggcgctgtggcttacacctataatcccagcactttgggaggccaaagcgggtagatcatgaggtcaggagttcgagaccagcctgaccaacatggtgaaaccccgtctctactaaaaatacaaaaattagctgggcgtggtgctacacgcctgtaatcccagctactcgggaggctgaggcagaagaatcacttgaacctgggaggcggaggttgcagtgagccgagattgcgtgcaccactctactccaacctgggtggcagagcgagactccatctcaaaaacaaaacaaacaaaaaaaacatgggccctaacaatgaaaggttttcattaatagagaggaatgtttatggtacattatctacttacaagcaaacctatgataaaaaagaaaccaagccaaacaccatggacatatttctgaaaagagtgacacctccttaagaagagcctcaggcaggtccttcagtgggtgttccagaagattgttgtcatagcaaatgacagctccatgcatgctattttccctgaagaccatgcagtgggacaagctgtgcagatggaagacagtgacatcgatgaccctgacctccctgtgtaggcctaggctaatgtgttgtgtgtgtcatttttaacaaaaaagttaaaaagtaaaaaatattttaaaatgttaaaaatagagacttacagaataaggatataaagaaggaaatatttttgttcagctgtacaatgtacttgtgttttaaattaagtgttacaagagtcaaagttttaaaaaatcagtttataaagtaaaattagttagctaatgttaatttattattgaagaaagaaaaatatttttaacacatttagtgtggccatagtgtacagtgtttataaagtctacagtagtgtacaataatgtcctaagcctcacattcactcaccattcactcactggctcacccagagcaacttccagtactgcaggctccattcatggtaagtgccctatacaggtgtatcatttttttatcttttataccatatttttactgtaccttttctatgttgagatatacacatacttagcattgtgttacagttgcctacggcattcagcacagtaacatgctgtacaggtttgtagcctgggagcagtaggccagaccacacagcctaggtgtgtagcaggctctactgtctaggtttgtgcaagcacactgtgatgtttgcacagccacaaaaccgcctaatgatgcatttctcaaaacacatccgtgtcattaagcgacgcatgactgtatttaaaagtataatgtgtagccaagagaaagataaatttccttggaaaacttagagtaatcatacccattatcattatggctttaaaatttaaataaaaattctaactttcagtggtgcctgagtgtataataagaacagtgtctgttggtttccagtactgttttataaagaaacagggcagtgagtcatattgactgatagatttcttggctaagtatctccttactagcaagagcatggactgtctgcccctcctgctgcttctgagcatatgcttcttgggaaatagaattggtaattgcttgcaatacaaactaaaacaaaaaacaataaaatttatattttgtttttcctccagtttcagatacaaaaatgtcttctcaagatcaatgctccagtccttacataaggccatttgattttgcaaaatgtcttagtaaatatttcagaaaccctagatactcaggctatcttaaatttagggctgtgtcccgctgaggagaaaatatattaatttggaagtataattaacatttttgtgtcttttgtttcccctccctagcattacaacacctccttgcttgccgctgcagcagcagcagtttcagatgatcaagacctcctacactcgtctcggtttttcccgtatacctcctcacagatgtttcttgatcagttaagtgcaggaggcagtacttctctgccaaccaccaatggaagcagtagtggcagtaacagcagcctggtttcttccaacagcctaagggaaagccatagccacaccgtcacaaacaggagcagcacggacacggcatccatctttggcatcataccagacattatttcattggactgattcccaggccctgctgctcccatccccaccccagatcgaatgaacttggcagaaagaagagaactttgtgctctgttttaccttactctgtttagaaaagtatacaagcgtgttttttttcctttttttagggaaaaaattaaaagaaatgtacagagaacaaaactatattttcagttttacttttgtatataaatctaagactgcctgtgtgataaaacacttgtttaaaaaaaaaaaggaaagaaaagaaaaaagaaaaacaagcacccacaaaccaccttcagttcatttttttctggattctgaagatttttcattatttgtcctatggttttggttttatttgacttcgatggcattattttatttgcaataacagaaaaggaattgcatgtatgaagttttcaatcgtgggcttttctttgttgtggggagggggtcgggggatagtttgatttccattttctgaaaacgacagacttggattctgtttgtgtgtgcatattttatccagccttaagttataaagctcatctgtcccgctgcattccctgtgtattttcaggacatggctcgtgggtgtgtgtgttcattgtgtgcgtctgtatgtatttttctgtcatcactgttccctctcctcccgagtgtgcattcagttaatataatcagttgcttgcttctttcaaagtgctttgaaggtcttgaactcacgtgtgagcatctttatcaactatcccaattgcatgttctccatcacatattctcttatttgctctgtaccccctgagaatatgttttagagatattggaataaagctgtctgggtaaggagtaggcttagccgacctatgaataatacactttagtctagttctttattctaaatctggattgccagtattgtgtatttaaaccaagtctgtgaatacctgctttttttggccacagagtaacaagttttcatgtaagatcttcataccaaagtaggaagtaaaaatagcttagaaagctctgtcaggtgttttgtgcagctgacagaggtaatgttacatcacctaaaaaagaaagatacacggtcagttatcctaaaaataaattgtttggaaagtacaatgcaccacatttttgtagaagtctactatttgataaacagttgaaattcaagatgtgtttgacccttagtcatttttactctttggttctgagtatacctattttcttagcgtatctgccttgtttatctttttcttcaccttttaacaagtatgacataggaaagtcatttttttttagaattcatggatcagtctgatctactcttattcataatggaacatgtaaatatactgaaaactgtttttcaggagagaaatatgagttggagggaaggaaaagtggttctactaatgttccaaaatcctcatcagagaaggtatgatgttctcaggtgtggaaaatattttttagttgattgagaatgcaggtttaacagaagagataaggggcataatgactgctggttttccagactggattttcctaccgcaactattaatgttctcagagttgatgaggaccacctttgtgtatacacttgtagttttaaaccttgcattggtaacaaaatgatcaactttaatccaggtagaattcaagatggctgtacttcagttgtatgataaaattaatggttctcatgacttgtgtggcatctaaaaataatgtttttatagcatctctctgccactaaattgttgacttgaattttgggaaaaaaaaaagttggtgttgatatgtatatgtgtgtgtgtatatatgtatttataaacaagtgtgtttgagtaacaagtgagtttcatagtcttcccctacgcatgtgtattccacacacaaatggctgagttatagtcataaaacaatttgcaataaaaaaaaaaccaaaacagattgtcagttaaccaggaaacagttaatgttttttaatgaatctggcattatagtgagcaaatgtcgtattaatttaggctaatttctaatactaccataatttgtgtctaaatttctgttggggtagaaattactaaaattgtggggagttttttctgatttttacattgctttaggaaacatttttactaattcagctgtcttaggtaaaatgaatagttttcttcctgtttttttatgtgtcattgttagtggtctcagaattctgatcagtaactttgtgtatgatgctgaattacaaaccgtttgaatgatccagttgaaaacgtatccctctactttcttcagttgtagaaaaggttaatttccctcagtgtcccacattataccaacctaagagaagaacaggtaatagggagaaataaacatacggtggtttcagtggttttggtcatgtgtccacaggagaaactaaccattcagttgtcttaattttagttcgttctaccctgtgaggagtttgtttccatcagttgttgactttccaaaatgttgcattaagtaatagttgtcactctgttggtctcatggtcaatatcaatcagactttcatgatctctactaattattagtagagtcctgtactatgtctgtaactactaagtttaaagaaaagcacatagtcacttcatctctttttttcttagcctacgctcactccccaacccatcccaacattgacatgctatctgtggacaaatagcagttctcagaatctagtcaagttgccatcatcccccttgccttggccgttcatagtaggtatgcatatgtttgtttctgtacagtactgtgtgtgtgtgtgtatatatatatacatctgtatgcacacatctttgataaaatagctatttgactagcagggttaaagtggcttttaattacttcgtgagtgttattggatacatcttaaaaaaaaaaaatctgaaccagaaccatgccatacttggttgactattttgagcattaaaattgctttactaattatttagacatgatcacaattctgtatctttactgaggaaagattcacgtaagctctgaaaaatcggattctttggcagattttcctttgagtcaagtgtctgaaatggagtgaaaatatatcctaactaaattaatgtggaaagagcatttttttagacaatttcaattttaaacacataaaactttcaagatcttcaggactttttaaagcacatttgaaattattttagtaagaattttgttttatcaatagatgttgaattctgttttttaattaaatacaaagcttagatttcagaaagagagggaaaatagctggtggtcccagagtgtgctgctgttaattgtttaacaaaggggaaaatgtacataaacagataaagttaccataaattccatgaacttaaatctgtgattcattgccttaaaactttctctcttagaatttccataccgcatgccaaaccagtaaaatggcttttaaaaatgtatagtagacaatgtcagtttgtataaaagtaccaagtgaaaatatttattacatgcattggaaaaaaattgtttacctattgaatgttacctgtttatgtagagctctttagatgtaataaaagaaaagccttcagttaatttgtcttctgtaaaataacactgctggatgttcaaggggacaatccctatgagacaagtgataatggtttgtgcttccaaagcacctttcatccagagatttcaaagcatgacaagtaactaactaattttcttgcagcatgctttgaggtaagtaatgaatatagccatcatttccctttcttgttgaaatatggctaactctttaataaatcacagcatctgtttagtatctgcagtttgaatgctaagagcaccgtggccttcttgtaaacaacactaggtgctagagaaaccagctggaatttcaggaatgagcttgaaaccaggaccaggagtaaggtaacagcccttcctcgggtagaggtttgaatcaaacacttaataggatcttagactctggaccactgaatcccttaatgagcagggagtccgtgaagaggagccccaggttctaatgaccattccacaccaactgtgtgtttttggcaagttatatttcagattcctgttaggcaaatgagattcataaaacttgctttaaaaccatactgggactattcagtgataaatatagacatagaaaagctttgacggaaagtaccctcatttattatatccagaacttgctcttcctgtgccatctaaatcattggtatctatctcccatctaatctttggtattccaggttggctgtgcaggatttacttcctaatgtccatgactggagctcaaaagaactgtgggcctaggacctttgagctttgcctgaaagtgacagcagttctctcggcggggccagcatctaaccggccctctggtggatttaccatgaaggtaatgaagtttaagcaccaggacccttcacttgttctggtcctaggagcagccccagaaattctgcatttctgtttttgtattcttaaggcagccaaatctcgtaaacctcagaccccacaaaacatctgctcctacactgtgtggacctgggcttcccagccagatggtcacaacttcacctagttggcatttgggccatttatttaccctcaccccacaaaactctttggctcctaggaattcctcctctccttgcagttatgcttggggaaatgagagtctccttcctcagggccttgtttgggtctgaagccacacagcatcgttgagacagttgcactaacactacaactcttgttccctgcagttttccctgtgcccggtgcctagtgaaagatttgtgtcttgtacatcctcccaaaagacacatcccatttgatttggttttcttctactttagccactgtggtactactagacaaagccacagcccagagaacccacttttgatacatacatggatgcaaatctttgtacttgaagccctgcacccctacctgtgttggtgtggtactccagcccttttaggactgtgctggcactacgaatgatccagatttgacaagtgtatggcacctctgaatctctggcagcaccaacctggcaccttctagctgtgtaactcactcaaagccactccagctggatggactcccagaaagcctagtgctcctactactgttttccagggctgttgtaccctggccattgctggttacatccccttatttctctccgtaagtcctggggaggtggcttaaggcaatgaccagtgtgggccacttgagcagaccatcccggaacctctctgcctgttaacagagcccagggaacagctcggaattctcacagcattggaagcccccttcttgagctctgcaaggccagtcaatttagcagctcacatctggtttcctttggtgtggggtgtaaagtagatcgctcttcctgctctcagctgatgctgcctcattgtagcatgtgttttcactctagtgttttcactctacactctgtgtttatgaatgaatagcctgagctatgtcactatatctgttgagatggaaatgagaatttgtaaatgggcctctggcactgcaagaattgttgtcataagtgttacagctttctgttcattgctgcttctcagctagcactggcttcatcttggaaaatcttggaaatatggaagatggttctagcccccaaatacagaataagtctcttggtagattgcccttaagtcatcagctcaatccttcctcaacaggctccatgaggtaagaagtgggaatccagcttgtgtgggggggctttgaggagtgaaatgatttgcccaaagtcacagtgggaagcagcagagccaggactggaacccaggccagactccaaaccgcaggctccttccatgcttgaaagggccggactcacggtagttaataaaatcaatacaaatcttttattaaagatctactcataccatggctgaaatcatctattattgttgctagttagcctctcttctatagttgggtaatgttgtcttgccactgtgtttgccatctctcccaagtgaaaagaacactttttaaaaaaaattaattgctccaagttttcaggcccaggggaggctctcccattctcctccttcaatagtcccgtccaggaagggtgatcttgtggataaattcatcatacttcactttgccattgggttcgatatctgcttccctgaagagatcatccactgcaataaatcacatttaatttttcagtttggctttagtgttccattataaaacagtgagttttttggggactggagctcccctaaggtcttccctgagcgtgcagttgactattcctgtagaccaggaagtaaaccagtgaacagaaagggacaacccatccctgcactcctgagacccttattccattttgagctaatcgggctttctgcaggggcagggagtagggaggtgtactggtaaggattcggtcactgatgccaccgtgtgcttttttttttttttttttaaaacagtttcgctcttgttgcccaggctggagtgcagtggcacaatctcagctcactgcaacctccgcctcccaggttcaagcgattctcctgcctcaggctcctgagtagctgagcttacaggcaagtgccaccatgcccggctaatttttgtatttttagtagagacggggtttcaccatgttggccaggctggtcttgaactcctgacctcaggtgagccatccacctcagcctcccaaagtgctgggattacaggcatgagccactgtgcccggcccaccctgtgcttttatttttattttttcatgaaaatatgacccctgtgcccatatttctagaatcctttggcctggagtttttaccttccgcagctcagcctgcaaacagagcgaacatcctccacagtcccaggcttcggcctgctcctcacttgcctgccttttcccctaagccggtgctcctcaccacctctgcccccaccccaagagaggacttagtgacaagcactgtctgctaccatcacctctaaaaaaaaaaaaaaatgtttgggggatggggtttatatgagagaaaaataaatccaactctgttgagagctcacagtatacaaaacaaaactgccattgttctccatcactccaaaaaaaaaaaaaaaatcacttcatttgcttgtttcttctggttctggattcctgggataaaataatagcttgtcccaggcgttggcaagagccatttcagcttgtattctccacaatggcctcttggggtcaacctaccatggctctttagcctgtcctcatctcactgccctgtgtcaacttcccaggcctggataccttccacacacacacctccggtcgtcagttagaaaatatcctgtgattctctgcttaactatccttctcgaaagtataatcaccatgccttggcctaagctgatagtagttctgagtatttattgggagaatgttgaggacagtataattcatctcattttgtggagaagtttccacaatcagccaggtggctaaaaccatcctgggggataggccaacatcagctccagggccagtcactgcagcctcttcccatctgggcgagggacagcacttagccaggtgccaagtctgaggacacctgagtagaacagcctttcactccatctcacttcaaagacccatagaaagccaaagtgctaaagtcagcccatcccaggcctcaggagaaggcttcacccacagccattccaaggatgctttttaaactgaaaattgtctttcgatcacccagaaaaaggattcctgctgctggtatcattcttcccatctcccgtggcaagtgggagggaaatcggtgtccctgcttgtctggaacacagcagtttctgtgaaacagtcctctgctggttattagagatgtatgtgagtctggggccatggcattgcttaggacagagatcattaaccacaaaaagaaggccctgctccctctgctgactccacctgctgtctagagggccgggcagtgtcctggggggagtctgggagggaaggatgacccatgtcttccctatccatgtgaaaacagccacgagaggtgaacctggaaaagctgggtatggagacccagcctgctgttgggcgattatttatttatggagataaagtctcattctgtcacccaagctggagtgtagtggcgcaagctcggctcactgcaacctccgcctcccagattcaagtgatcctcctgcctcagcctcccgagtagctggggctacaggcgcccgccaccacgcctggctaatttttgtatgtcaggcaatttttaaactctgcagcaatttttaaactctctgcactgtgccttaatggcagtagctaaaatctgagcagagtgatttgtagagtggtagctcagagggacctgaggggtcacctactgtaccctcatttccagcaaggaaagcgaggtgggagaaaggtctcctggcacccaggattcaaaccacagcctcaaagctctcctccagtggtttattgtgatttaaccagagacggaaagtccgtcatattgaagcctctttccagcacccacttgtggccaagcccagctctcctgtccaaaccacaggcaagcagggcagcctacctagaaaccccaggctctaaggtcggggtccctggcctcgggcagaggcagagctggctggctggctgctgcgaacatggcagggctaggcaggagggtccgcaggctggaagaacaaaggctgtaaatggccttggcgtggggatccccttgacagtgtacaaagggctttcctagaagaccccaggcctcgtcctgctctgaggcaggacagcctgctaggctgcaggaaggtgcaaagcaaagacccctttctcgtggggctctggaaccaggaaccctgcctgtctcggcagttctccaactgtcctggcaaagttccctctggagcccctttctggaagagcttagagcagcctgagttggaaagggagcaaagcagcacctcaattcggaaactcgacctcagcagcaactgcagagactgctgtgatgggaaaaagggcagggatgtctagacctgccttcgctcctgcgccgctgcttgggagccgctcactccccctgcttctttatcagtaggagcaggcatttgtgctcccaggggtgtcatgcactagatgaagccccacagtgagagcttgaacacagggggagaccagactgcacgctccagctgccctgccttgtgggttccgagctgggtttcccctaggctgtcccttcaccctggcagacctccctgcgcccttccagcccctctagttcttccccaggctccagtccagcacccacctagtgtggcatctgctcacagtctcctgcgcgcgcatcaacagaggtggtctgtaccaccctggtggcatcagctaggctttggtgccctccttccaactccctaaccccctccaactgttgggagacaggacccaggctgttaccttccttgtgggtgagcttctcccccagactcgtgagttttgaccgcaggtcggacgccatgacgtaacctttcttctccttgtccaccatcaacatggctagaagaatttctttctttgggtcttcttgttttatttgcatgtgcataatggtcagaaaagtggagaaatccagctctccatttccgtctaggaaacccgcaaacacagcagagtgagcagagggaaaaagactcctaggaagccagctggcctcctgctggacctgcacagccggttcaaggtcaactgaccagggaatgccaggatgtggcagtggtcacagtgaagaggatgcatcccctcccaccgagttcccacgacaggcccctcactggactggacattcttcatttcagcaacgtcctcagtgacgatgcttatcatcaccccaaagctcaagaaagtgggttcccaaccacagatggaggactgggctcctctgctcccttctagcgcttccctcctgccctgaactggagggaaacaggtccatgtgtgcattccacctttgacagccaccacagtacatcttaccaggatggatcagcacccccacctggggtctcaagcctcagtcgcaggctgggctgctcacctgccttcccctcactgcagtctccatcccagcccctcctccacgggccctggctgggatgtaactgcaggaaatcaaaacttccctggactacaacttcctgtttggaggggacagaaatcaaggaaaccaccacccctttggagctggacatgggggatctcaggtatcagaccactgagcaacccaccgccaggctgcaggctttcagaggcccacctgggcccagcgtggcctgccccagggtgggctcccagcgcaactgcaggcatcctctagtggggcctctggtaaccctagcagatggtggtgacccccctgagatgaggaagctggtgacctgagactgagcagcagcctatgggctccgggtcaagtgctattcccagcggatgcccttcccctgcgccagtccctccttcctgagtgtccagcccccaatgcaaacagcaaccccaggctctgaaactactttttttcttagaaaaagcaaaacaaaacataaaacttgtttctgattatgaaaagctgtatgtgttctcattgttgaaaatacaggaaacaataaaaggaacaaaaatcacccataatcccattaccagagagaaccacttggtaacatcttggatgggttttctttcagcattttttttctagcaatagtttttctaaaaactattgcatagtttttaggtcagtctttgatatcagaagaattgggtactaatcctgatgccatcattggctcaagaacttaatggatgtaaaccttgatctttgcttgtaaaatggagttaggagaaagctgggcgcagtggctcaggcctctaaccccagcactttgggaggccgaggcaggcagatcacctgaggtcaggagttcaagaccagcctggccaacatggcaaaaccccatctctactaaaaatgcaaaaattagctaggcgtggtggcaggcacctgtaatcccagctacttgggaggctgaggcaggagaatcacttgaacctgggaggcagaggttgcagtgagccgagatctcaccactgcacgtcagcttctcggtgacagagcaagactctgtcccccctcaaaaaaaaaaggttaggagaatgcctacttcatagggtttttggagctaagcacatgacaaatactcaacaaagggaaatgttcctataaagcaacatgggatcgctgtcagcgcgatttttctctgggtttggtaagtctgttggaacgcctagatcccgaggtctgtgagatggggtatcactggttgctatgaggattccaggaagcccaagtgaggtacggcactcctggtctggggctgccacagctggatccccaggaggcctccctgccacctgcccctcaaactgctgagcttttcacacctctactgtctgcacccacctgctgggcccctcccctctccccgttgttcccaccaccactcacctatcccgtgggtctgcaggtgccgctgcacctcccctggcgtcgggctggcccccaggcacctcatggccaccatgaggtcggtggcttttatcttccccctctgctgcttgtcatacagggagaagcattccttgtactctgcacacggcccagagggagggtcagcagcgtctggtcactctccgcccatgccgccctccccatccttagtctcttctccctcttttccccttccttttgcctactccctccatccctctctcccctcccaagggtgctagatacagcaaatgaaaatacaggactgccaagttaaaccgaattcagataaacactgaatatacttttattgtatgccccaaattttgcataggacatatacttctattggaaaagtatttgttgtttgtctgaaattctaatttaactgggtgtcctgtattttatctggctccccttccctttctccctactccctcccttccttctccctccccctccccgccaacccacaggactggaactcccaggacagtgcccctccagggcccacaggggagagcaggaacccacagcaaggcgtccagacccccaggggacctctgcaaacacaacttttctggacaatgggaataataaggcctcaggattactgtgagagccagaaatcccaggaggcctgccagagagtggccttcatatgatgatattatcatcatcatcagagctggggcatttctgagcctattgcccctgccctggcctccaggctgctaaaccctcaagctgtccttggactcgggccctggtcctgttcttagagacttcaaagggtcctgctgggaaattctcccagggtctgaagccctttctccttcggtacttggtggaggtggaaggcagccggagctagctcccctaaacccacagactcccggcctgacacagccatcccacgggctcccggccctgggaggcccaggaaggccagctgggagttcaggaaaagtccctgaaccgcactgactgagcatctgatttaggggtaggtggggctgccatcaggacagggagattctcgtccagcccagacgaggcacccgggcctgtgggtggagccgtggaaacacagtggcctggcgctggccctcccaggctggggctcagggctctgttctctctcctgcttctcacaccacccaggtaggtccttagaggcctggacaataatagccccttagctgatgacagcaacaatgacaattcacgttgctgagcactccacccccaggccctcgcttcatccccacaaccctgtgatgcgccccctcatattcccatgtgcggacaggacattgagggctggaacactgagagcctggctgtgggcagctctgcccaccaggccacactgccttcggttccagggcagacaccactgagagcagtagggtgagggagaggatgcagaaggagccccccaaatccccagcccagaccaggggtcccttcatattccctaatgaaggcactcaggcctccctggtaggatttcaggggggtcactaaagacaggcagatcgccatgtaccatttagagacaaattcgcggcctttgtggagagactgagaggaaagccccagccccgcacaactgccctttcagaacattccagagcctgagcttccgaaggggcaaaccaaagtcaggaccaggtggcaggggccaaaaaggcccaggggaagcagggccagagcctggcctaagaccccaggtttagttcccataaaacccaattgcctgcaagagggcccagtgccagaggggacaatgccatcacctcacgtcagggggacagagagaggactgccccaatcacagagcttaaccttagcactacagggggtacccctggggacctctcatggccaccctcaccttgtctttctgtctgggtttgcccttgggtgagggtgggcccaaggcccactgctctccctgcctgacctgtgctggaaggtgctcatcacacccttggggtccagaatcagcctggatctgcagatgggggcacttcactactccccgacaagccctgtcagtcactgggggcctgtggtccttgccagcagcagggccagggctcaaatagaggcccacctcctcacaaaccttcacatcagatacgtgctgtctccctgcctcagacgcctttaaagacctggaaggccacatctgaactttgcattcctgcactggaacaagacaacagggtgctggagacccagctgggcttcctgctggccccttcctccaccatctcttcactctccctcctcacctcctggctctccttcctgctttttctcctgacaggtcggccctctaacatactagcacatatatttcaccacgttcccctccctcgatggtgaccccctgtgaggaagggatttttgtctttgagttcactgttgtatgtagctccaggcacaaagaagggacacaaacatttgttgaatgaaaggattaattgggttaaatgaattggattaaaaatcccctttaagtcttctctttgaaaatgcaaatcccccaggacaagaaagagacctgtgcaaggcctaggataacaccagctgtgctggatgtttaaccaccagctctgatcataaatgtacttgtgtcctctgcactgtacaaacataaaggatgtgtagcacacaatttacaaataatacagaaatgtacactattctttattataaattccatctagggctgggtgcagtggctcacgcctgtaatcccagcactttgggagggtgagacaggagtatcgcttgggcccaggagttcgagaccagcctggacaatatagtaagacctcatgtctacaaaatatttacaaatgttttgtgtgtggtggtgcatgcctgtagtcccagctactcaggagacagaggtgggagaatcccttgagtctgggtggtgaaggttgaaatgagcggagatcatgccattgcacagagcaagactctgtctcaaataaataaattccatctagccacttgattaccacaaatgagttttgccaactttttttttttttttttttgagagagttttgctcttgttgcccaggctagagtgcaatggcacaatttcagctcactgcagcctccacctcccaggttcaagtgattctcctgcctcagcctcccaagaagctgggattataggcatgtgccaccatgaccggcttttttttttttttttttttttttgagacagagtctcgctcttgttgcccaggctggagtgtagtggctcaatctcggttcactgcaacctccgcctcctgggttcaagtgattctcctgcctcagcctcctgagtagctggaattacaggtgcctgccagcacaccaggctaatttttgtacttttagtagagatagggtttcaccatgttggccaggctggtctcaaactcctgacctcaggtgatctgcctccctcggtctctcaaagtgctgggattacaggcatgagccactgcacctggccagttttgtatttttagtagagatggggtttcaccatgttggccaggctggtttcaaacccctgacatcaggtgatccacatgcctcggcctcccaaagtgctgggattacagacgtgagccactgcactcggcccaagttttgccaactcttatatccattgccaacctatagtttcgattcaaccatgatttgacaaatgaagctgcgcgccaatgagtgcgattctttttccaatgaatgaatggtcattaaacctgatgtgatctactgttaaactatttctcacccttttaccaaatacattcattaaattgaaacttctttcaaatctccatctccactgatcacaatagggctgtctttttaactttttgtacagatagatgtagggattgacacactgtttgatcctacattatttaataatggctggctttaacatcctgcttgcaaaattcctaaaactatggctcttgctagctgtagtgagccagccccagcccacatgtgggtgacacctggctatgcctggcccagcgtccagcatgtaactgacattattcccctctgtccgtggc

SEQ ID NO: 2282 - DNA, 8143 bp, Homo sapiens
tggagttgtttctgcgcggagcttagccctggggagaggaggaagcccgggctgtgaccccggcctttcggagggtggtctgcgtttcctcactggcccctccccttgtcttccagataccctgtgtaacgaactcgaccaggagcggaaggcgcgctatgccatccagcagaaattgaaagggcagcttctccagctcccagttctggcagtgcatggtaaccttcagtgcccagctgacagaagcttccctcagcatcttctctaagtggtgtgccactggcaaggcacctgaccatgaacggcttcccccagcaccccatcacctgaagaatttgcagcaagtttcaagcaaatggttatgagccttagagtttctgaactccaagtactgttgggctacgccgggagaaacaagcacggacgcaaacacgaacttctcacaaaagccctgcatttgctaaaggctggctgtagtcctgctgtgcaaatgaaaattaaggaactctataggcggcggttcccacagaaaatcatgacgcctgcagacttgtccatccccaacgtacattcaagtcctatgccagcaactttgtctccatctaccattccacaactcacttacgatggtcaccctgcatcatcgccattactccctgtttctcttctgggacctaaacatgaactggaactcccacatcttacatcagctcttcacccagtccatccggatataaaacttcaaaaattaccattttatgatttactggatgaactgataaaacccaccagtctagcatcagacaacagtcagcgctttcgagaaacctgttttgcatttgccttgacaccacaacaagtgcagcaaatcagtagttccatggatatttctgggaccaaatgtgacttcacagtacaggtccagttaaggttttgtttatcagaaaccagttgtccacaagaagatcacttcccacccaatctttgtgtgaaagtgaatacaaaaccttgcagccttccaggttaccttccacctacaaaaaatggcgtggaaccaaagcgacccagccgaccaattaatatcacctcacttgtccgactgtccacaacagtaccaaacacgattgttgtttcttggactgcagaaattggaagaaactattccatggcagtatatcttgtaaaacagttgtcctcaacagttcttcttcagaggttacgagcaaagggaataaggaatccggatcattctagagctttaattaaagagaagttgactgcggatccagacagtgaaatagctacaaccagcctaagggtttctctactatgtccacttggtaaaatgcggctgacaattccgtgtcgggcccttacatgttctcatctacaatgttttgacgcaactctttacattcagatgaatgagaaaaaaccaacctgggtttgtcctgtctgtgataagaaggctccatatgaacaccttattattgatggcttgtttatggaaatcctaaagtactgtacagactgtgatgaaatacaatttaaggaggatggcacttgggcaccgatgagatcaaaaaaggaagtacaggaagtttctgcctcttacaatggagtcgatggatgcttgagctccacattggagcatcaggtagcgtctcaccaccagtcctcaaataaaaacaagaaagtagaagtgattgacctaaccatagacagttcatctgatgaagaggaagaagagccatctgccaagaggacctgtccttccctatctcccacatcaccactaaataataaaggcattttaagtcttccacatcaagcatctccagtatcccgcaccccaagccttcctgctgtagacacaagctacattaatacctccctcatccaagactataggcatcctttccacatgacacccatgccttacgacttacaaggattagatttctttcctttcttatcaggagacaatcagcattacaacacctccttgcttgccgctgcagcagcagcagtttcagatgatcaagacctcctacactcgtctcggtttttcccgtatacctcctcacagatgtttcttgatcagttaagtgcaggaggcagtacttctctgccaaccaccaatggaagcagtagtggcagtaacagcagcctggtttcttccaacagcctaagggaaagccatagccacaccgtcacaaacaggagcagcacggacacggcatccatctttggcatcataccagacattatttcattggactgattcccaggccctgctgctcccatccccaccccagatcgaatgaacttggcagaaagaagagaactttgtgctctgttttaccttactctgtttagaaaagtatacaagcgtgttttttttcctttttttagggaaaaaattaaaagaaatgtacagagaacaaaactatattttcagttttacttttgtatataaatctaagactgcctgtgtgataaaacacttgtttaaaaaaaaaaaggaaagaaaagaaaaaagaaaaacaagcacccacaaaccaccttcagttcatttttttctggattctgaagatttttcattatttgtcctatggttttggttttatttgacttcgatggcattattttatttgcaataacagaaaaggaattgcatgtatgaagttttcaatcgtgggcttttctttgttgtggggagggggtcgggggatagtttgatttccattttctgaaaacgacagacttggattctgtttgtgtgtgcatattttatccagccttaagttataaagctcatctgtcccgctgcattccctgtgtattttcaggacatggctcgtgggtgtgtgtgttcattgtgtgcgtctgtatgtatttttctgtcatcactgttccctctcctcccgagtgtgcattcagttaatataatcagttgcttgcttctttcaaagtgctttgaaggtcttgaactcacgtgtgagcatctttatcaactatcccaattgcatgttctccatcacatattctcttatttgctctgtaccccctgagaatatgttttagagatattggaataaagctgtctgggtaaggagtaggcttagccgacctatgaataatacactttagtctagttctttattctaaatctggattgccagtattgtgtatttaaaccaagtctgtgaatacctgctttttttggccacagagtaacaagttttcatgtaagatcttcataccaaagtaggaagtaaaaatagcttagaaagctctgtcaggtgttttgtgcagctgacagaggtaatgttacatcacctaaaaaagaaagatacacggtcagttatcctaaaaataaattgtttggaaagtacaatgcaccacatttttgtagaagtctactatttgataaacagttgaaattcaagatgtgtttgacccttagtcatttttactctttggttctgagtatacctattttcttagcgtatctgccttgtttatctttttcttcaccttttaacaagtatgacataggaaagtcatttttttttagaattcatggatcagtctgatctactcttattcataatggaacatgtaaatatactgaaaactgtttttcaggagagaaatatgagttggagggaaggaaaagtggttctactaatgttccaaaatcctcatcagagaaggtatgatgttctcaggtgtggaaaatattttttagttgattgagaatgcaggtttaacagaagagataaggggcataatgactgctggttttccagactggattttcctaccgcaactattaatgttctcagagttgatgaggaccacctttgtgtatacacttgtagttttaaaccttgcattggtaacaaaatgatcaactttaatccaggtagaattcaagatggctgtacttcagttgtatgataaaattaatggttctcatgacttgtgtggcatctaaaaataatgtttttatagcatctctctgccactaaattgttgacttgaattttgggaaaaaaaaaagttggtgttgatatgtatatgtgtgtgtgtatatatgtatttataaacaagtgtgtttgagtaacaagtgagtttcatagtcttcccctacgcatgtgtattccacacacaaatggctgagttatagtcataaaacaatttgcaataaaaaaaaaaccaaaacagattgtcagttaaccaggaaacagttaatgttttttaatgaatctggcattatagtgagcaaatgtcgtattaatttaggctaatttctaatactaccataatttgtgtctaaatttctgttggggtagaaattactaaaattgtggggagttttttctgatttttacattgctttaggaaacatttttactaattcagctgtcttaggtaaaatgaatagttttcttcctgtttttttatgtgtcattgttagtggtctcagaattctgatcagtaactttgtgtatgatgctgaattacaaaccgtttgaatgatccagttgaaaacgtatccctctactttcttcagttgtagaaaaggttaatttccctcagtgtcccacattataccaacctaagagaagaacaggtaatagggagaaataaacatacggtggtttcagtggttttggtcatgtgtccacaggagaaactaaccattcagttgtcttaattttagttcgttctaccctgtgaggagtttgtttccatcagttgttgactttccaaaatgttgcattaagtaatagttgtcactctgttggtctcatggtcaatatcaatcagactttcatgatctctactaattattagtagagtcctgtactatgtctgtaactactaagtttaaagaaaagcacatagtcacttcatctctttttttcttagcctacgctcactccccaacccatcccaacattgacatgctatctgtggacaaatagcagttctcagaatctagtcaagttgccatcatcccccttgccttggccgttcatagtaggtatgcatatgtttgtttctgtacagtactgtgtgtgtgtgtgtatatatatatacatctgtatgcacacatctttgataaaatagctatttgactagcagggttaaagtggcttttaattacttcgtgagtgttattggatacatcttaaaaaaaaaaaatctgaaccagaaccatgccatacttggttgactattttgagcattaaaattgctttactaattatttagacatgatcacaattctgtatctttactgaggaaagattcacgtaagctctgaaaaatcggattctttggcagattttcctttgagtcaagtgtctgaaatggagtgaaaatatatcctaactaaattaatgtggaaagagcatttttttagacaatttcaattttaaacacataaaactttcaagatcttcaggactttttaaagcacatttgaaattattttagtaagaattttgttttatcaatagatgttgaattctgttttttaattaaatacaaagcttagatttcagaaagagagggaaaatagctggtggtcccagagtgtgctgctgttaattgtttaacaaaggggaaaatgtacataaacagataaagttaccataaattccatgaacttaaatctgtgattcattgccttaaaactttctctcttagaatttccataccgcatgccaaaccagtaaaatggcttttaaaaatgtatagtagacaatgtcagtttgtataaaagtaccaagtgaaaatatttattacatgcattggaaaaaaattgtttacctattgaatgttacctgtttatgtagagctctttagatgtaataaaagaaaagccttcagttaatttgtcttctgtaaaataacactgctggatgttcaaggggacaatccctatgagacaagtgataatggtttgtgcttccaaagcacctttcatccagagatttcaaagcatgacaagtaactaactaattttcttgcagcatgctttgaggtaagtaatgaatatagccatcatttccctttcttgttgaaatatggctaactctttaataaatcacagcatctgtttagtatctgcagtttgaatgctaagagcaccgtggccttcttgtaaacaacactaggtgctagagaaaccagctggaatttcaggaatgagcttgaaaccaggaccaggagtaaggtaacagcccttcctcgggtagaggtttgaatcaaacacttaataggatcttagactctggaccactgaatcccttaatgagcagggagtccgtgaagaggagccccaggttctaatgaccattccacaccaactgtgtgtttttggcaagttatatttcagattcctgttaggcaaatgagattcataaaacttgctttaaaaccatactgggactattcagtgataaatatagacatagaaaagctttgacggaaagtaccctcatttattatatccagaacttgctcttcctgtgccatctaaatcattggtatctatctcccatctaatctttggtattccaggttggctgtgcaggatttacttcctaatgtccatgactggagctcaaaagaactgtgggcctaggacctttgagctttgcctgaaagtgacagcagttctctcggcggggccagcatctaaccggccctctggtggatttaccatgaaggtaatgaagtttaagcaccaggacccttcacttgttctggtcctaggagcagccccagaaattctgcatttctgtttttgtattcttaaggcagccaaatctcgtaaacctcagaccccacaaaacatctgctcctacactgtgtggacctgggcttcccagccagatggtcacaacttcacctagttggcatttgggccatttatttaccctcaccccacaaaactctttggctcctaggaattcctcctctccttgcagttatgcttggggaaatgagagtctccttcctcagggccttgtttgggtctgaagccacacagcatcgttgagacagttgcactaacactacaactcttgttccctgcagttttccctgtgcccggtgcctagtgaaagatttgtgtcttgtacatcctcccaaaagacacatcccatttgatttggttttcttctactttagccactgtggtactactagacaaagccacagcccagagaacccacttttgatacatacatggatgcaaatctttgtacttgaagccctgcacccctacctgtgttggtgtggtactccagcccttttaggactgtgctggcactacgaatgatccagatttgacaagtgtatggcacctctgaatctctggcagcaccaacctggcaccttctagctgtgtaactcactcaaagccactccagctggatggactcccagaaagcctagtgctcctactactgttttccagggctgttgtaccctggccattgctggttacatccccttatttctctccgtaagtcctggggaggtggcttaaggcaatgaccagtgtgggccacttgagcagaccatcccggaacctctctgcctgttaacagagcccagggaacagctcggaattctcacagcattggaagcccccttcttgagctctgcaaggccagtcaatttagcagctcacatctggtttcctttggtgtggggtgtaaagtagatcgctcttcctgctctcagctgatgctgcctcattgtagcatgtgttttcactctagtgttttcactctacactctgtgtttatgaatgaatagcctgagctatgtcactatatctgttgagatggaaatgagaatttgtaaatgggcctctggcactgcaagaattgttgtcataagtgttacagctttctgttcattgctgcttctcagctagcactggcttcatcttggaaaatcttggaaatatggaagatggttctagcccccaaatacagaataagtctcttggtagattgcccttaagtcatcagctcaatccttcctcaacaggctccatgaggtaagaagtgggaatccagcttgtgtgggggggctttgaggagtgaaatga

SEQ ID NO: 2283 - protein, 640 aa, Homo sapiens
MVMSLRVSELQVLLGYAGRNKHGRKHELLTKALHLLKAGCSPAVQMKIKELYRRRFPQKIMTPADLSIPNVHSSPMPATLSPSTIPQLTYDGHPASSPLLPVSLLGPKHELELPHLTSALHPVHPDIKLQKLPFYDLLDELIKPTSLASDNSQRFRETCFAFALTPQQVQQISSSMDISGTKCDFTVQVQLRFCLSETSCPQEDHFPPNLCVKVNTKPCSLPGYLPPTKNGVEPKRPSRPINITSLVRLSTTVPNTIVVSWTAEIGRNYSMAVYLVKQLSSTVLLQRLRAKGIRNPDHSRALIKEKLTADPDSEIATTSLRVSLLCPLGKMRLTIPCRALTCSHLQCFDATLYIQMNEKKPTWVCPVCDKKAPYEHLIIDGLFMEILKYCTDCDEIQFKEDGTWAPMRSKKEVQEVSASYNGVDGCLSSTLEHQVASHHQSSNKNKKVEVIDLTIDSSSDEEEEEPSAKRTCPSLSPTSPLNNKGILSLPHQDVSRTPSLPAVDTSYINTSLIQDYRHPFHMTPMPYDLQGLDFFPFLSGDNQHYNTSLLAAAAAAVSDDQDLLHSSRFFPYTSSQMFLDQLSAGGSTSLPTTNGSSSGSNSSLVSSNSLRESHSHTVTNRSSTDTASIFGIIPDIISLD

SEQ ID NO: 2284 - DNA, 7940 bp, Homo sapiens
ggcggaggccagaggcgggctgggaaggtggaggggcgggccggggcggggccaggccggctagaggggcgggtctagcggcggcccccggcgaagttcactgcgcttgcgctgacagacgcaagatggcggacagtgcggaactaaagcaaatggttatgagccttagagtttctgaactccaagtactgttgggctacgccgggagaaacaagcacggacgcaaacacgaacttctcacaaaagccctgcatttgctaaaggctggctgtagtcctgctgtgcaaatgaaaattaaggaactctataggcggcggttcccacagaaaatcatgacgcctgcagacttgtccatccccaacgtacattcaagtcctatgccagcaactttgtctccatctaccattccacaactcacttacgatggtcaccctgcatcatcgccattactccctgtttctcttctgggacctaaacatgaactggaactcccacatcttacatcagctcttcacccagtccatccggatataaaacttcaaaaattaccattttatgatttactggatgaactgataaaacccaccagtctagcatcagacaacagtcagcgctttcgagaaacctgttttgcatttgccttgacaccacaacaagtgcagcaaatcagtagttccatggatatttctgggaccaaatgtgacttcacagtacaggtccagttaaggttttgtttatcagaaaccagttgtccacaagaagatcacttcccacccaatctttgtgtgaaagtgaatacaaaaccttgcagccttccaggttaccttccacctacaaaaaatggcgtggaaccaaagcgacccagccgaccaattaatatcacctcacttgtccgactgtccacaacagtaccaaacacgattgttgtttcttggactgcagaaattggaagaaactattccatggcagtatatcttgtaaaacagttgtcctcaacagttcttcttcagaggttacgagcaaagggaataaggaatccggatcattctagagctttaattaaagagaagttgactgcggatccagacagtgaaatagctacaaccagcctaagggtttctctactatgtccacttggtaaaatgcggctgacaattccgtgtcgggcccttacatgttctcatctacaatgttttgacgcaactctttacattcagatgaatgagaaaaaaccaacctgggtttgtcctgtctgtgataagaaggctccatatgaacaccttattattgatggcttgtttatggaaatcctaaagtactgtacagactgtgatgaaatacaatttaaggaggatggcacttgggcaccgatgagatcaaaaaaggaagtacaggaagtttctgcctcttacaatggagtcgatggatgcttgagctccacattggagcatcaggtagcgtctcaccaccagtcctcaaataaaaacaagaaagtagaagtgattgacctaaccatagacagttcatctgatgaagaggaagaagagccatctgccaagaggacctgtccttccctatctcccacatcaccactaaataataaaggcattttaagtcttccacatcaagcatctccagtatcccgcaccccaagccttcctgctgtagacacaagctacattaatacctccctcatccaagactataggcatcctttccacatgacacccatgccttacgacttacaaggattagatttctttcctttcttatcaggagacaatcagcattacaacacctccttgcttgccgctgcagcagcagcagtttcagatgatcaagacctcctacactcgtctcggtttttcccgtatacctcctcacagatgtttcttgatcagttaagtgcaggaggcagtacttctctgccaaccaccaatggaagcagtagtggcagtaacagcagcctggtttcttccaacagcctaagggaaagccatagccacaccgtcacaaacaggagcagcacggacacggcatccatctttggcatcataccagacattatttcattggactgattcccaggccctgctgctcccatccccaccccagatcgaatgaacttggcagaaagaagagaactttgtgctctgttttaccttactctgtttagaaaagtatacaagcgtgttttttttcctttttttagggaaaaaattaaaagaaatgtacagagaacaaaactatattttcagttttacttttgtatataaatctaagactgcctgtgtgataaaacacttgtttaaaaaaaaaaaggaaagaaaagaaaaaagaaaaacaagcacccacaaaccaccttcagttcatttttttctggattctgaagatttttcattatttgtcctatggttttggttttatttgacttcgatggcattattttatttgcaataacagaaaaggaattgcatgtatgaagttttcaatcgtgggcttttctttgttgtggggagggggtcgggggatagtttgatttccattttctgaaaacgacagacttggattctgtttgtgtgtgcatattttatccagccttaagttataaagctcatctgtcccgctgcattccctgtgtattttcaggacatggctcgtgggtgtgtgtgttcattgtgtgcgtctgtatgtatttttctgtcatcactgttccctctcctcccgagtgtgcattcagttaatataatcagttgcttgcttctttcaaagtgctttgaaggtcttgaactcacgtgtgagcatctttatcaactatcccaattgcatgttctccatcacatattctcttatttgctctgtaccccctgagaatatgttttagagatattggaataaagctgtctgggtaaggagtaggcttagccgacctatgaataatacactttagtctagttctttattctaaatctggattgccagtattgtgtatttaaaccaagtctgtgaatacctgctttttttggccacagagtaacaagttttcatgtaagatcttcataccaaagtaggaagtaaaaatagcttagaaagctctgtcaggtgttttgtgcagctgacagaggtaatgttacatcacctaaaaaagaaagatacacggtcagttatcctaaaaataaattgtttggaaagtacaatgcaccacatttttgtagaagtctactatttgataaacagttgaaattcaagatgtgtttgacccttagtcatttttactctttggttctgagtatacctattttcttagcgtatctgccttgtttatctttttcttcaccttttaacaagtatgacataggaaagtcatttttttttagaattcatggatcagtctgatctactcttattcataatggaacatgtaaatatactgaaaactgtttttcaggagagaaatatgagttggagggaaggaaaagtggttctactaatgttccaaaatcctcatcagagaaggtatgatgttctcaggtgtggaaaatattttttagttgattgagaatgcaggtttaacagaagagataaggggcataatgactgctggttttccagactggattttcctaccgcaactattaatgttctcagagttgatgaggaccacctttgtgtatacacttgtagttttaaaccttgcattggtaacaaaatgatcaactttaatccaggtagaattcaagatggctgtacttcagttgtatgataaaattaatggttctcatgacttgtgtggcatctaaaaataatgtttttatagcatctctctgccactaaattgttgacttgaattttgggaaaaaaaaaagttggtgttgatatgtatatgtgtgtgtgtatatatgtatttataaacaagtgtgtttgagtaacaagtgagtttcatagtcttcccctacgcatgtgtattccacacacaaatggctgagttatagtcataaaacaatttgcaataaaaaaaaaaccaaaacagattgtcagttaaccaggaaacagttaatgttttttaatgaatctggcattatagtgagcaaatgtcgtattaatttaggctaatttctaatactaccataatttgtgtctaaatttctgttggggtagaaattactaaaattgtggggagttttttctgatttttacattgctttaggaaacatttttactaattcagctgtcttaggtaaaatgaatagttttcttcctgtttttttatgtgtcattgttagtggtctcagaattctgatcagtaactttgtgtatgatgctgaattacaaaccgtttgaatgatccagttgaaaacgtatccctctactttcttcagttgtagaaaaggttaatttccctcagtgtcccacattataccaacctaagagaagaacaggtaatagggagaaataaacatacggtggtttcagtggttttggtcatgtgtccacaggagaaactaaccattcagttgtcttaattttagttcgttctaccctgtgaggagtttgtttccatcagttgttgactttccaaaatgttgcattaagtaatagttgtcactctgttggtctcatggtcaatatcaatcagactttcatgatctctactaattattagtagagtcctgtactatgtctgtaactactaagtttaaagaaaagcacatagtcacttcatctctttttttcttagcctacgctcactccccaacccatcccaacattgacatgctatctgtggacaaatagcagttctcagaatctagtcaagttgccatcatcccccttgccttggccgttcatagtaggtatgcatatgtttgtttctgtacagtactgtgtgtgtgtgtgtatatatatatacatctgtatgcacacatctttgataaaatagctatttgactagcagggttaaagtggcttttaattacttcgtgagtgttattggatacatcttaaaaaaaaaaaatctgaaccagaaccatgccatacttggttgactattttgagcattaaaattgctttactaattatttagacatgatcacaattctgtatctttactgaggaaagattcacgtaagctctgaaaaatcggattctttggcagattttcctttgagtcaagtgtctgaaatggagtgaaaatatatcctaactaaattaatgtggaaagagcatttttttagacaatttcaattttaaacacataaaactttcaagatcttcaggactttttaaagcacatttgaaattattttagtaagaattttgttttatcaatagatgttgaattctgttttttaattaaatacaaagcttagatttcagaaagagagggaaaatagctggtggtcccagagtgtgctgctgttaattgtttaacaaaggggaaaatgtacataaacagataaagttaccataaattccatgaacttaaatctgtgattcattgccttaaaactttctctcttagaatttccataccgcatgccaaaccagtaaaatggcttttaaaaatgtatagtagacaatgtcagtttgtataaaagtaccaagtgaaaatatttattacatgcattggaaaaaaattgtttacctattgaatgttacctgtttatgtagagctctttagatgtaataaaagaaaagccttcagttaatttgtcttctgtaaaataacactgctggatgttcaaggggacaatccctatgagacaagtgataatggtttgtgcttccaaagcacctttcatccagagatttcaaagcatgacaagtaactaactaattttcttgcagcatgctttgaggtaagtaatgaatatagccatcatttccctttcttgttgaaatatggctaactctttaataaatcacagcatctgtttagtatctgcagtttgaatgctaagagcaccgtggccttcttgtaaacaacactaggtgctagagaaaccagctggaatttcaggaatgagcttgaaaccaggaccaggagtaaggtaacagcccttcctcgggtagaggtttgaatcaaacacttaataggatcttagactctggaccactgaatcccttaatgagcagggagtccgtgaagaggagccccaggttctaatgaccattccacaccaactgtgtgtttttggcaagttatatttcagattcctgttaggcaaatgagattcataaaacttgctttaaaaccatactgggactattcagtgataaatatagacatagaaaagctttgacggaaagtaccctcatttattatatccagaacttgctcttcctgtgccatctaaatcattggtatctatctcccatctaatctttggtattccaggttggctgtgcaggatttacttcctaatgtccatgactggagctcaaaagaactgtgggcctaggacctttgagctttgcctgaaagtgacagcagttctctcggcggggccagcatctaaccggccctctggtggatttaccatgaaggtaatgaagtttaagcaccaggacccttcacttgttctggtcctaggagcagccccagaaattctgcatttctgtttttgtattcttaaggcagccaaatctcgtaaacctcagaccccacaaaacatctgctcctacactgtgtggacctgggcttcccagccagatggtcacaacttcacctagttggcatttgggccatttatttaccctcaccccacaaaactctttggctcctaggaattcctcctctccttgcagttatgcttggggaaatgagagtctccttcctcagggccttgtttgggtctgaagccacacagcatcgttgagacagttgcactaacactacaactcttgttccctgcagttttccctgtgcccggtgcctagtgaaagatttgtgtcttgtacatcctcccaaaagacacatcccatttgatttggttttcttctactttagccactgtggtactactagacaaagccacagcccagagaacccacttttgatacatacatggatgcaaatctttgtacttgaagccctgcacccctacctgtgttggtgtggtactccagcccttttaggactgtgctggcactacgaatgatccagatttgacaagtgtatggcacctctgaatctctggcagcaccaacctggcaccttctagctgtgtaactcactcaaagccactccagctggatggactcccagaaagcctagtgctcctactactgttttccagggctgttgtaccctggccattgctggttacatccccttatttctctccgtaagtcctggggaggtggcttaaggcaatgaccagtgtgggccacttgagcagaccatcccggaacctctctgcctgttaacagagcccagggaacagctcggaattctcacagcattggaagcccccttcttgagctctgcaaggccagtcaatttagcagctcacatctggtttcctttggtgtggggtgtaaagtagatcgctcttcctgctctcagctgatgctgcctcattgtagcatgtgttttcactctagtgttttcactctacactctgtgtttatgaatgaatagcctgagctatgtcactatatctgttgagatggaaatgagaatttgtaaatgggcctctggcactgcaagaattgttgtcataagtgttacagctttctgttcattgctgcttctcagctagcactggcttcatcttggaaaatcttggaaatatggaagatggttctagcccccaaatacagaataagtctcttggtagattgcccttaagtcatcagctcaatccttcctcaacaggctccatgaggtaagaagtgggaatccagcttgtgtgggggggctttgaggagtgaaatga

SEQ ID NO: 2285 - protein, 649 aa, Homo sapiens
MADSAELKQMVMSLRVSELQVLLGYAGRNKHGRKHELLTKALHLLKAGCSPAVQMKIKELYRRRFPQKIMTPADLSIPNVHSSPMPATLSPSTIPQLTYDGHPASSPLLPVSLLGPKHELELPHLTSALHPVHPDIKLQKLPFYDLLDELIKPTSLASDNSQRFRETCFAFALTPQQVQQISSSMDISGTKCDFTVQVQLRFCLSETSCPQEDHFPPNLCVKVNTKPCSLPGYLPPTKNGVEPKRPSRPINITSLVRLSTTVPNTIVVSWTAEIGRNYSMAVYLVKQLSSTVLLQRLRAKGIRNPDHSRALIKEKLTADPDSEIATTSLRVSLLCPLGKMRLTIPCRALTCSHLQCFDATLYIQMNEKKPTWVCPVCDKKAPYEHLIIDGLFMEILKYCTDCDEIQFKEDGTWAPMRSKKEVQEVSASYNGVDGCLSSTLEHQVASHHQSSNKNKKVEVIDLTIDSSSDEEEEEPSAKRTCPSLSPTSPLNNKGILSLPHQDVSRTPSLPAVDTSYINTSLIQDYRHPFHMTPMPYDLQGLDFFPFLSGDNQHYNTSLLAAAAAAVSDDQDLLHSSRFFPYTSSQMFLDQLSAGGSTSLPTTNGSSSGSNSSLVSSNSLRESHSHTVTNRSSTDTASIFGIIPDIISLD

SEQ ID NO: 2286 - DNA, 203639 bp, Mus musculus
  misc_feature (1)...(203639): n = A, C, G or T/U
gatcctcctgcctccacctcctaggtgctgggattacaggatgtggcatacatcagcgttgtgaggtgctaggggtggaacccagggcctagtcaagctagagaaggactttaccaactgagccacatccttaactcagtttttatcctacaaactgaaactgccttcccggcaggcatcagtgtctcccactcaggctacaacagttggtcacgggttcctctttccagctgaccccaaggtgcctcttccttccctttgtgcagccagcaccaagcaagcagaggagaccactggaaatgagccactacagccctgcacgtgagggctatccagaggctggccagagtgcacctcaaatagagacaaaactcctgttgtggcttcaagactgaaatgtgtaagaaggtgcagggatggaacacaggggaggctcgagatggatgttcattcccatggcgtagagtgatggcttagtggttaagataacctgttaattgttcgaaaggacaattcctaacactcacacgatggctcacaattacgtgtaacgtcagttccatgaggtctgatgctctcttttggtctccataggcaccaggcacaaatgtggtgcatagatgtagaacaccatacacataaaaataaaatttaatttttaacaaatgtccattccccaagtcccaactcagctttctctgtgctcctcctgactttgcggttggagccacacgcagctcttatgaggaaagtctccgtcaggctgcgcagggacggcttctcatctagcctgaccaccttgtaaaatatgacgtctcaaaagctttcttttccattgtggaggcagaagagaaagcaattaggaaaattacaggaggcaggggagtctgatgtcagccgaaggggaagatagccatatgaaagaggagaacccagggagatgtggttgggaaaagcgtgagacccggggtgtccattagccagcaggtaaaatggcctcagaaacctcaccgtgcctctgttgttgcaactggcacaaccactgggccaaaactctgcgagggagaatgtcttctgggggttgcatgctgtcagacgcttcaaccgagaaagaaaaccacacacacaccacaagatctcagtgctgtgtgccaaggacccgagctgctgaaaccagaatgccagggcagtgacgccactctgacaaataaatgtcagcaaattcccatctggagttccctgagtagccatcatgcagcctcccacacaggcacgggtcgcctttgttttgggggcagtgtggagccgctgagggaggcctggacttcgagcacagcagggtggcacagctgcaggccactgctgaacagcagcagagaccccgcttcccttctaaggcttcctgcctcctggccgcccctgttctctgctggccactagaaacccatgtttccacatgctcgtaggctttttatatcacagcggaaagttttaaaacttgaagcagaggaaatccaactcaaccctcccccttttcttccagtttactttctcccagtagtcatctggaattggtcaccatggcctcatcttaaaataattgtgtgtgtgtgtgtgtgttaatgcttgggcatatgtgcacatgtggtctctgtttgcctttaaaagacctcacaatgcaatggcacaaacatgaaaaaatataaagaagctgacaggaagtggagataatatggcaatacgttttatgagaatgaagcaggatccatcagccttaaaatttgcatgcaatgtacaaagactattagacgattcacagacagcccctacccagattttacagaaaaaggaaacatctctgaatcccatcctcttaaaacacctttatttttattcatgggtatatacatgtgcctgctcacctctttgtgcaccatatgtgtgctgtgcccttggaggccagaaggtggcgttagatcccctgaaactggagttacaggcagttgtgaaatgcttatgacctgcctgatggccagggctgggaaccaagcctaggtcctcagcaaggcagcccgtgcttttagaggcgaatcccttttctagcttctcgtcactctttatacattcaaaattagctctaattacaaccacagcagtgactctccacggggacatgatcctgtaccactgactggtgtggacacctggagactttctgtgttggttgtcacaagtcaggaaatggcactggcatctagtgcacagaggccaagaatgcttgcccaacagcacagcccaaaaagacagagtggcctcgcccagtatggcaacagggtggatgctgagaacccctggcctagaggacaggagccctgaaagagggatccagctctactcatgaacagaataaaaatcctccaagactgagccggtgttctttcttgcagaacccctcactccaggtacaaaggtcttcccttgttatgtctgctcactctgttgcatgcttctttgaatactagccataaaaaaaaaaaaaaaaaaaaaaacacttgacaattaattctagatgcctgaaaagaatccttgagtatttttagtgagaagactgactaaaacctattccatgaaataatgctctcattctgctaacaatgtaggtgactggggcaatgctcgaggtatttatgatggatggcccatgtaaatataatcagaaaatatttctggagtaaagttaacttacttaaagtcagacaactaaaaagaggctaccatcagtgggcggattcccctatgaacactcccggagagctcagacagagagctgaccctgctctggtagcccctctatgctgctgccgacccaatggctcatgctttcctcccctggacaggctgacgctgagggaagcctcagctggcgggtcagagccagcagtcagggctttgcggaacactacacccaaagctggttggtagtttctgagcttttcacagctgccctgggctgcctccaccttcgtcagccttgcttctcgggtaagctgcagagatctatttgaagcacaatgccatgtccaaactgtcattcttgccagaaaagtttccaacaactttcagacttagccttataaaatgattttatatcagatttgattattcactaaatgttgctattgctgaagggactatacagggtgaaaggcatagagtagtgaatatcacatgaccatcgcatgccgcacaaaagccatccagttacacagacacagcagaaatcaaagtctcagtctagacaggctccaaccttctaggacacaacaccatgtgctgtgttacaaacggtcctgcacaacacggctgacaaaatcctactcggcacctcctccccactaactagaaaggcaatccttgtggttagtcccccatcaacaaatagaacacgtgagtgtgtgacaagctgctcacagtaggtcagatgctctgctctacaggaaaggaagcaagcagcagcaagtacctacagagaccttttcatttaccatttgcctgactcaatacatttcccactgaggtcccaaagttcctgcagcaggagtataaacgtattctaagaactgccaaagttaatatccatttctcctgtctccattttgacaatgtgcagttctggttgccaaatttgcaaaaacagaaagatggattaaatctcaggtccccaacttttataggtaagtggctttgaagaagctcagcctcactgtgctttaattacacactggtacacagtgtgttcttgcctgtgaggcccctcaggtctgaggataatgggtttaatccctgagtttcactccttaagcgaatggcatctctcttgtaagaaatgtaaaaaatctcaagtcctaatgttagctggaaaaattaaatgtattaagaagtatcttgatgaaaaacaaaccagtttctgcccctaaattccatgggacaccaccgttcttagtgcctgtggtgacagctctgaggacttgtggcagatcttgctgccctcatctcttcatctgctgaagaaaataaagacctggaaacagtgctgaatgaaacccggctccagagcagaccaaaggctccactcaggtcctctctggaagctgtaggaaaaccacaggttgtgactcagttgcatcccagccctggatcaggagcctcctctcagtgactcaggagcctcttctaagcctggagtctgtggatggagaaacactcccgatcctgccgagcgagagttcttgttttgccaagaagtaacgctataaacacttgctgagagactctccatggccaagtctgtccatcaaaaaattgggctttcttgttcccactgtttagaaacctgacgaccagggaacaaaggcttctagattctgaacacacaaagctaaattgtccctgggcttgtagctcatcaggggatggcttccgtaagatccacaggcctttggttcaatttcctgaaccctggaggtggggtgggagtgtggcaaggatggacagacaacaggacacacaaatgtttgagtcaacatgtaggatgtctgttgagatctcaaaattaggcttaattattaaaaaataaaataaaaataaaataatctaggttaagaatgccaaaattgctgggcatggtggcatatgcctttaatgacagcctcaggaggtagaggtgggtggaactctgcgagtttgagaccagcttgtctagacagtgagttccaggccagccagggctacagtgagaccttgttcaaaaaaggaaattcagagtcagtaagcgctacactaccaaacacagaaggaagaattactgatacacagaatcctcaacccaacgggatgtcatattaatatgaacagatatgtggcctactcacattaatcctatacagtgaactgacacacaatgtctctgccttaaatttaattaactgagaaaaagaaaaacccagaaattgttagacttaaagcacaaatgatcttttaatgtatatttaatgcattacacatacttcccatgttaaataacgctctattttaatgtaatatacattttctaggcagattcccccctttccattcatcaataaatcttcaaccatcccagacagtaatgaagcatatttaaaactattttgtaagtattcattcttcctaccacttcatcccccaaagcagccaccttaagcagcctttctgcttactatggagtagagtaacaaaacgtctcagctctacctttctctgggctaagacttgaccatgaacacacacagcagcagttactgcctgagcactctgggtaaattaaacctcgtatttccaaaccagtttcttcaccataagatggaaatgccctagcctactgtgagtagaactgaagtaaattttatttttaaaaaacacagttgagggtgcctggaaagatggattagaagttaagagagctatctgatcttccaggagatctgaattcaattcttaggacctacatggtagctctcaactacttgtaactctagctctgagggatccaacatccaacgccctcttctggctttcctggtattgcactcacatgcacacacagacacacatctattaaaaacactcttgggaagagttctacgtgcacatttactactatcataatatctctaagtttctgaatgttactaattgaaagaattttgctacagatgttctggaagcttgtccagatgtagaaacaaggctgctaatccacagttgctggcttggcatcaactacaccactctctaggagttcttctaagttcctctcagaggaatgagatgtgagctcttaacattttctaattctcacaggtagagcacacatttttactacactcctcttgagggtgggaccagtaccttaagacataatttttgtagcagtagctagaacagacactagctccatgtttaataatcatttatcataacacacatttctagaatgaaaatatgatgtccacaaacacactccaggcagaaagaactctgatgaagcgcagtcactctcacgcatcacgcagtcccctgcacaagctcctccagcatgctgagcttctaatggcctacactgtgggacaggtgagagagctcagaaggcgacagtgcagacaggccagataacctaagctcagcctcaggaatgcatgtggtgggatgagagagctaactccgacaaggtgtcctctgaccctcacaaacaaataaacaaaaacttactaaaaaaaattgtatatatatacacatatattcatatacatgcataaacacacacatatattttatatatatatatatatatatatatatatatatgccaagaaggcctccccttagctatgtatgtatctaactggagtactgcaagtaagtcttacagtgacaagaagtttttgacaaagtccatgcgggttctttatccacagtcaagagtcaaggcctactgattttttttaaagtggatttctaaagaacttgatatttgattacaagatatttccactgttggtcaagagcagtaaagcagatcagatacagagagagtgatgacagaaacaggattcctcttccagatcaaggcacatcccagtcaatcagaaacccgggtcctacctagactacagccactcatcgtggtggtctctgtcttccatccccaaattaaatccattccctgaatagtgtaactccgtccgtccgtctttaacgccatctgaggcctccgtccccatgaccttgtaagaactggccagccctctttcctgctttacttatttaaaccatctgctggcttttctgcacttcccctgctgacgtgtggagcactgatgagtggcacctaattttaacaagaattagagtttcctaagtcactctgcatacagaaacaaaatgggctgtttcgtagaacttcacacacacacacacacacacacacacacacaccaataatgttcaaagtctctattaaagaacaaaggaagaatgccaccatttgctggctactggtggtcgatcagctctttcaaggaactgaccacgattgccagttctgatctttgagaaacaggaccgggccaggcacggcgggctcaacacttggacaagttcagagctggcctaggagacacacaagacctttttggaggatgaaagggagacagagcaccatagctatcagaatatataatattcctgagcctgcctttgaaagatcattcacctatcactaataggactctaaatgcatatacattttattgaaagtcagataaatacagacccataaacgccttcagaaaggtctggtatattcactgcatggatgtacaatagaaagtactttttgacttagtgttaaaaaaatatcaggatggggattagggtgtgactcagtagtagtgcacttgcttaacacgtgcaaggcactggaatccatcatcaacaccacacacacacacacacacacaccaggctaaaaactacatatgaagtagaattatataattacaataattataaaatacagaaaatatgcaggggccccggggagatggcaaaaaaaacaccaccaaaatgtcagctaacatttttttctccatatgctaaattttactaaattcaacatgaagtagaaggggcaaagatgggagacctggtgggagggaagggggagcactccctggtgggggatgggggaaggggagcactccctggtggggggtgggggaaggggagcactccctggtgggggatgggggaaggggagcactgcttaggggaagtaagagaatggcaaagagtttggttctcatttatgaatgttgtaactaagcttctgccctagcaaggaactgtctaagtgttcagaataagcaagttatagaatacccgtgcaggaacaacagcatgcctaattctgtcaacaggtgtagaaaataattacaaactgcacgatgctttacaggctcggccgcatttgcaagccagcacccacagtctcccaggacacctcttcatgtgccccctttaaggctcagcaaagcctgagttaaacaggtgatacgcttttataataaggccaaccacttatccaatgcttgccacgtgctggcctgtggccaaacataatcctcagcccacagataggaagatgaagggcagaggttcagtgacttgcccacagtcagagccatagacctggccagtgagctgcctcctcagctctagctcactagtctctctgacctacatttcagagctcattttggggtggggctggggtttatctctgaggtagagtgccacgctcagtatgcacagagcagtgggactaaaaagcagaaaacacacacacacacacacacacacacacacacatgtatattcgcgtatgcacaacaaaggcaaaaaaaacaaaacaaaaacaaaaacaaaaacaaaaccctgaattttatagcccttagggtccagaagcaaaagcactgggtgcagtaacacctcaaactcatttttttccggggaactttcacctcagaaagaactcaagaaatgtaactgcaagtgagggggcacccaacaaatatcatgtacacacaagtatgcatgtatgtacattacacacacacacacaatcaaggggagggaatcaagaacgcccacagctctcatctctaagggagtaagcgtttattctggagccaaatatggagggatcatgaaaagggaacaggaatcaggggtgcctcaagtcaaatgttccannnnnnnnnnnnnnnnnnnnnnnnnnnnnnnnnnnnnnnnnnnnnnnnnnnnnnnnnnnnnnnnnnnnnnnnnnnnnnnnnnnnnnnnnnnnnnnnnnnnnnnnnnnnnnnnnnnnnnnnnnnnnnnnnnnnnnnnnnnnnnnnnnnnnnnnnnnnnnnnnnnnnnnnnnnnnnnnnnnnnnnnnnnnnnnnnnnnnnnnnnnnnnnnnnnnnnnnnnnnnnnnnnnnnnnnnnnnnnnnnnnnnnnnnnnnnnnnnnnnnnnnnnnnnnnnnnnnnnnnnnnnnnnnnnnnnnnnnnnnnnnnnnnnnnnnnnnnnnnnnnnnnnnnnnnnnnnnnnnnnnnnnnnnnnnnnnnnnnnnnnnnnnnnnnnnnnnnnnnnnnnnnnnnnnnnnnnnnnnnnnnnnnnnnnnnnnnnnnnnnnnnnnnnnnnnnnnnnnnnnnnnnnnnnnnnnnnnnnnnnnnnnnnnnnnnnnnnnnnnnnnnnnnnnnnnnnnnnnnnnnnnnnnnnnnnnnnnnnnnnnnnnnnnnnnnnnnnnnnnnnnnnnnnnnnnnnnnnnnnnnnnnnncagcagcaggggcataacccccaaacacaacaccgcaactccagcgccttacattcgtctaagagcacaatttccggggtcttgaatatcatcttagggggtgcttgccaccacccctgaggcgggaggtcagaaaccggcctcactttacacaggcagaaggttaagcgcctggcgccgagacctgcggaggagccggagcctggggcccagctcgggcagagcccgggagaggtcgccggccctgcgcccatggctctgaactgggccttgcagcccggctcagacgtcgggttactcacgttgcaccagccggtccccggtgaaggtggcggagcagctggtaaccagcgcgcagggtacaccggcagccatcgctgcggcagagcgggttccgcgccggcgctgcttccgccttgggccgtaccactgcagcgggcacgcgggggagatgatccgggcacgcgcgctgggcggggccgcgcgctgggcagccgaggctccggctggccctcacaccccccttccccgctcctccagtggagcgcgccggtcgcgcgcgccgcgttgctatggtgacgggtgcccgcaccatctaggagcgctccgcaggaggccatacctccggagcctagtgtcttctgccctccttagtcatggcgcaggcccaggaggacagcgaccccattggatccatcctaatccaggtgggaaacaggccgggctggcggccgcacagacctcccctcgaaccccgaaacctgtgatcccaagcaccaccatttattctctcggccctatagcaggaaacgcctacactttagggcatcatgctctgggggttgaacacaggacatgctagcgccaagcaagtgctttaccgctaggctgcatcacctgtcttccttatacttcgggcccagatggtcattgactgtcttggagcaccctctacaatccaggcaggcctggaacttgtgatcctcctgcctcagcctcctgagtaactgggattatcaatctgtactagcaggctggggtgctcaaggcaccatttaaaaataaattatgaaatgtttaaagtccatccatggcttggggatgtgaaggagaaacagattcatcattaggaggtggtgagaagttcgaagagaacgtgagctatgggacccgtgcttcttaacctacaatagtcactgcttgcttgggaacacacacccaagctttttttaaaatttttttttcttcgagacagagtttctctgtgtagccctggctgtcctggaactcactctgtagaccaggctggcctccaactcagaaatctgcctgcctttacctcccaagtgctgggattaaaggtgtgcgttaccaaacatatttttaagatcacctggattacaaaacaacataaaaaatgaaaacttggagaaatatcttatttataatctagggagaaagctctcaaagacttgacttctccagtgtaattcagtttgtgacagttgaacaatttttctgaaacagctaggttggtttggtttttttttttttttttttgctttgttttgttttgtttttttccgtgtttaggtatgggtccctttaagatggtctcactttaagaagttctgtaagacccccgatgctgggcctctgctcaagtcccgggatgagctggccaacaccccaacatctcgagagaaaaccacacctgatgcaaactgcaagaggttttattatcagctagctgaggacgaagtccctccacagtgcagggcaggggagttcgacccgagtggtgacagtagggggcttttaacagctagctgaggaattgggagaggtgttgggaagagttgggaggagagctgggaagagttcttctcttctgggtgtccttggtgaaatttacaaggcaggtgtggggagtgagttctttctgaatttttatctccgtgtcctcggcacaggaaggcaggcatctctggttgtacagtatagaaacaaaaaggctttttgctggctatagagaacaaagagcttctttctagctatatttttagagatcagagaaaacaagcttggggaccgtccaggggctttaccttcctgggagaaacgctctaagtcggggtcccacagttcaccataatttctaactcatatttaattgacaaaggcttgagatagcgtcctgaacgctttagaatacacatcctagtacacctttttcaaaactccagagttcctaagcccactagcttcatagacatccccgttatgaattggacctaaatcttacctgtatcacactcaacaatttcccctgtggtgaatttagccaaatataacaccagcgaggacagtccccacccatgtcctcactgacaccaactgcaaggtcatgtatgaagctctcgaacaaccctcacgtcagttaggctggctgtgagcctatgagtcccatggcactctcacattttatttgtgagaaaggctcatggaagtcagagatgagctaccctggtgattaggattaaagttagccaaggagagagatgcatagcagagtccaggggccatcccagaagaggtgtcaggtatcacctccttccaggcacaacgtgtgacatcgtgtgacatcgtatagaagctggacaactagaagaacttccctgagctttctccagtcagagctgggatgttgctcaaactcacatggccctcgaggctgactctgtgaagactcccgttcctccacacgtcacaacagacacagggcagctcaaaaccccactgtaaataaactgtgtttgttgttagactgccttgtgactaaagcatccagatacttatgtcaggcaggacattccagaggtttagagctcatctctgagtagcagagggccagacctctctttgagtacagttatgtttttctctatacagagcccccttttcattgacacaaaacaaccagaacactagtggagacttgtccccagtcctgggatcagccagttcttctcacagtgacctgactacaggggcagtagtttcctgttccagcaagcctgaagcatagcttaaaaagagagaaggagggggctggggagatggctcagtggttaagaacactgactgttcttccaaaggttttaagttcaaatcccagcaaccacatggtggctcacaaccatctgtaatgagatctgaagccctcttctgggatgtctgaagacagctacagtgtgcatacatataataaataaatcagtctagaagaagaagaggaagagaaagaactgtggggttcagttttacaccttcccttaaagtaattctttccttcaggtctggaatagtatagaacagtagctgttaacagttaaaagtcttcggagtgcaatctagatgtagtggctaagctcaaatacccagcagtgaaagacaacttctgacattggattggataactggaatggaaaggcataacacagtcatctctacattagccggtgtcctgcttgtttaggagggggttacatgaacttttttgtgggcagacgcgaacgtgtttgctttccccagataaggcaccaaaataatgattctatccaaatctcacttggtaaaagtgagttttattgtgattgcctccatgagagtaggtaacccccaaacactgaatcacccgagtctcaccccagcatgaatagcttccttaaagttgcacaggtggagtttgcttcagccaaccttctgcactgtgtttactgcctcctctggagaacatgaggtcacatgtgactttcgaaaccttaacttccactgcatcggcgtagactccctgacactgggtcaggtaacgtggctaagctgatacagtcaggggccacaagcatcaacgggctaaagaaacatcccctttgctggatcagcattggacttaaaggaaagtacaggccaatttcacaccacagagcttatggtaccatttaatacaggaagccaaaggagctcatgctccatggtgtgacagggcagggtgggaggacagggagggatgacggcggctttcctttactctgcgcagaggcctaggcatccttcatcagcaggctctgactagcatcctttatcagcaagctgtgactctctttggtatgcacatgtaaagtgcatgaagagatagtgatctgttagaaactggacattcatttgtaaaattgtatggtttgatttttacggaagaattccatgataatcaaattctcaaaaattaaaaacaagtgcttagagctagactaacatttcacatacatagagacccctttctatgagtggagccgatcctcagatggaattctaggcagctgtcaacttggcagagtccagagttatctatggagtctgacctatgggacagcccccatcagattggcctgtaggcaggtctaaggtgttttgggattgctgactgatgcaggagagcctagcccactgtgtgtggttgcacccctgggcagatggccctgggttgtgtaaggaagcaggcagagcataatccagagagaacaggacagtaaacagttcctccatggcttctgttccaagttgcagcccagctggacttcctaccttgtgctcctgcctggcttccctccttgatggactgtgagcagtaagatgaagcaggccctttcctccacaagttgcttttggtcatggtgttctccacagtagcagagagcaaagtaaggcagttggtactttgagagagtagatctgaaatacttaggtgcaaagttagactcaagtagtacctgggtattatatactgctgtactcaaactatctgggtaacttgccaggaaagccaactgttagttttttcctagaagcagttgtcagtatttggttccattgtcagagcgggaaccagagaacggcagcttcatggagttctttttggcaatattctgcaactacaacttctttcgctttcaggcttataattgggatgtttgtttgtttggttggttggtttttacacttttagctgactctttcctcaactggtcagattagtgagatagcgtaatgggagtcatcatagagccagtatatgggagagccaggctctccaggaagctctgggctatgttgtggagtcctaacaagcatgttaggggagcattaggcctcagtctgtaaaagaaagccaagtacaaacctgtaacgtgatttgataaaagcagtaatatccagtgtgttgctccttaagcaggttatgtgtgtaggtcatgtgtgcagcggtgtctttgtttctgagtatatttaacggatgttcctgtaatgaaggatacctggtcttttctttaaattagttttggacattatattacaaaagtccagcagatgtatcctaacacgtagcttggaaacattgaagctaattgacagcttgatattttggctgactctctttcactagtccctatgtgtgacttataaggcacatataataccaaaatgaacaaggtcaaaaggaactccaagagaggaggtcgaatcagccaaatttgtgctgagcagaggtgaacaaaatggattttatgtcggtaatgactctgtgacgtctagtctcatggagttttcgggatttacagcaaatcttttctgcattaagtctttcaaggtttctattagtaatgattctgtcccagtctgtcaaaacagtaatcatttctaagcagaaaatgtaccgttagtaatgtttttgctgttcataaagataatgggtgacctgtaaaatttcaatatgggagattggatgtaactgaagaaaatatagaaacatagaatttagcctcattacctgccaggtctggtgtaacatttcccatggtgctcgtctctaatgcagtcacccttaacagggacttctttccacttcaaaaatgacaaaatcacctagcaagaaccaaaggatgctcttgagaaagatgaagcgagcaactctgttcagcgatacagtgaaggaagcgtcagctagttacatacagtgtacacacaggggctttcaatgcacagagcagaggctccacagcctcctctgtggcgagcctgtacaaaacacaccacacactatttctcactcaaattctgaagtagctgttttccaggtgagaacactacgcccgtaggagcctctggaccgtttccagggccaggcaggattccagctctcaggcatctggcagtcaagtctgtactgcttcatttttatgtccattacctcatgttcgtttactaattccaaagagtagggaaatgattctgttctggcaaaggaactagaggaggtgctgaaattttgaataacatgagtggaaattgaatgtttcgagttaatgctaggagctgtgtgcagctgccattgttgagttcttcctatgcatcgggcctgttgcatgttctctcacaactctatgaaggagtgttgtccacacaaggggagaatggaggaaaactaaaacctttggtaccctggtgaataatccaactcagtttcactccctcacatggctgcaagacattatcgcagaaaggtccaaggaaacagccagttcactcctaagaggaaccaaaatgtatgcacccaaaggactcaccctttgaactgcccattacactgcacacagtagatgctaagttagattgcagcactgatttggacaatcagaacacacacctcttcatcattggtccctataggcaagcagggagtttgttcgggtaccagtctgtgagccctggaggttctgtgtgacgatttgagcagagtacaaataatttaataatttaatgtgtctgccagacttcaatgcccatccgtgaaaagatgcaaattctgcctcttgaatatggcccttggttccatgggcacatccccaagtcagtagtatcataggctgggccaatgtgagtccagttatcctaccagagcacaggtagacatttcaaagtgccgttagcaacccagtctgcagattgctgttgatgtgcctgccgctgaaacaggtgtctgggttatgcattagcctaacaaagtgttttccttgtggcagcagcccatgcaataatcagtgccatctgcatttatctggtttggtttctaacgtgcacgcatcgagtcagcgcttccttgtgttacagtgcccgttggatgccagacagaagtgtgctcaccatttctaaggaaagcacccactggaggaggggcacgttaaagcaatggcatatgctgctttcttttcctcatggattatttccacttctcactaagcaaaaacaaaatccaaggcacatctacatagctgccacctcagaccagtgtggcagaaccagcctggagggagagccacctggccccgtgggcgcatttgttgtacctttcaaaggtacactttctcaagagcccttttttgctggacgttccccgtgttttgtttgtttgtttattttgaactttaactggtctgtagagatcagcatctggctcagacttgctgtctctgttcatcagctttacccccggagaaagcagcagtcatccaggctgcacttcaaccttgtatctgtttctagtagctgcacaaaacaaatgctacagaaaccttcttattcaaactctgaggcaataatcttcttaattcagactgtcctaaagccacagaggcagccctttttaatgactgccataaagccatgtgtgcctagcaactcaagcctactgtaggcctgttcattcagtaactgcagggctgggggtgtggctcagctgcttgcctagccctggattcaatctccagcactgcataaaagccagcctgtggtgcatacctgtgattccagtttctgagggtggaagtagaggtataaggaagttcaagatcatctgtggcttcctagtgaaaaattcaaggctagtcccagactgggtaaaagcatgtctcgaaaaccaacaacaaaacctcgcaacaggtagacaatgtgtgtgtgtgtgtgtgtgtgtgtgtgtgtgtgtgtgtgtatatatgtgtgtgtgtgtgtgtgtatatatatatatatatatatatatatacatacatatgtatatatatatatatacacatatctataattttttttgcattcaggttcatgaggaccttcatcagttaaaggaaaaattagtaaaattctcagccgaggagacaaggagcactctagacattcaaaatcttgagacagcaatccaaaggactgaaatggggttaaaggtaagtagagccttggaaagcaagtaaaacactgaagaggaaaggtctggtggttcccacaggcccctctgcagctggttagcagagcttggcttagggtggccaccagacctttcttcagatttctgcttgaaacgcaagtagcagaaagaccttattccatgttggcactgatgggtcagatgtccttagccacgccctttcctgactgtggtacccagtttcagttgtgttggagggctacaggtcaatgaagctttaatgttcaattgttcattataatttggggacatttgaagtaatttagtcttgtgatgcctaatgctatcttaggcatgcaataacatagtgtttgtgcatttgggctggtgggggcttaattacacaatccaaaagtattgacctaatgaaatgaagtaaattagctaagtatcttacgtccaccataatggcctaagctttgacttttctgtaacagattcacatcgacaagtatctaggtgttgtaaaccaggaggtgttaatggctcctgtgaagaaaagcttggaatcccctgtcacttccaaatggtaagtaaaacagccatgttagagctcaaagtcagtaacgccgagaaccttcatctcttaggcaaaattgcttgaagttagtgtcacaatttgggattcagggacacctgcgtgcagggtactttcaggactaccgcttgccagcagggctgttgtttggggtcctagattgtattgtgttttggtgagaaatagttaaaattctccaaggtaacatttcaatgaaaatgggttgggttttacagcatttcaatcacggggtactttgtttacagctttgtacttccttccatatgtgccttatgactaaagtaatttggggaccggagagatgggttagaagctaagagtgcatgctgcccttccaggggacctgggttcagtctctagcatccacagtggtttggatcttcctgtgaccccagctccaggaaatttgataccctcttctggcctctgcaggcacacctctgtcccctaatacacacagtgtatagaatgcatgcctgtgcatgcactcacatacatgcaggtactcatataatccatacaaacacatacatataaaataaatcttaaaagtaattttggtatccacagtaagcaagagaaacacccattatgtaatatacactaagagaggattgattgaattcaaactaaattgaaaagaagtgctcttgcctggccttgggcctcctcctaagggaatatagattacgagtggtagtcggtcttaaatccctgtgacttttctttgtgctttgcatatgaaccgggtacacatgaccaatggtaagcagtagagcgagtgttctaaacttcaaggtaacatggaacggtgtgtgtggacagagccaagtctcagtgctgaacagtggcattgacatggctcttcccatgttcccctccatgaagttggtggcacaggtatctatcaccctttgtagaggcgaccctgccctgttctccatgtttccctagcctgtgtccattagcacctatcctctaggactactccatagtcaccaatttcaccctcaccaccgaggtggtaattactactgtttgataacagattatccaacgttaatgtcttaggctaccaaagcttattacaacatagtttgttgtcaggaatagaggtaggcacagccttgctaagggcctctgccacagggtcactcataagctaagtgttgactggaacagacccctttaagacttggcacggcactgggaaggcagcctcaggagagacgggtgaggttctacttccaacctcaggcacacaatctccatttgccttccgggcccctcactgatgtgtaaccacaggacttgaaccctgaggaattagagaaagtccattccatctgggagcctctgaaagcagaatgggcctggggctggccaaatggtggacaacatggtacaggaatatgttgtcaccatcaaaatggcttcaatgacagtgatcctcctgtctcagaccccctagttttggatttcaagggtgagcaatcatatctggcttcatccataattctttgctgtaacaatacactgacactccaaatctccacttacggctgggtgtttgaatctaaaacctcattctcctgtttgtcctgagggagactgtcttatcagcccatacctagttcatattatggaggcttacaggaacttgtacactgagatagcactgtggccggtgctctgtgggatttaaaagagtccacatttggagcaaagacactatcttggtgacaatcacagtgcgagacaacacctggctaaacggagactcaagtagagcaggttgaagcgtgcagaggttacttggggctactgtagagagtttgggggcaaagtagttcatggacgcaggcctactgaaaggaaaagggagccttttctggggagaataatatagcacaaataaaagccacatagagagtgaccactgaaggtctgttcaagcagggagacacatcagcatgctgggtggggagtgggggttgggggaaaagaggaggggtaaggagggtgggtagggagaacgggggacagactaggcaagagtaaaatctaaactcattttcctagaaatggggaagcaccgatggtttttatgtcagtctgtgactcagtagttctttgtaaagatgactctggaaacaatgctttagacaacggctgagccacacagtgtagcgagattagcagctgggtcagcagcagttgcccacacagtcatcccttggcttctctgtctcttgttcatgtacgcacagctgctgcttgccaagtgtgctttagatatgggagcgatgtcagttagccacagaccttgtccttgcaacacagcttctaatctgagacgtttagacctagatgaaggtccttggaagggagagtgagaggaaaacttacattggaagcatttgggcaggtggaccgggagctttttactgcagaggatttgggtttgggggagatgatgcaggagaccctgggctgtaggccagtgctgagcttgggatgaaaagccaaagagaagccactaggccaggctacaggctgactgtggtagaccaggctacaggctgactgtggtagaccagactacaggctgactggtagaccaggctacaggctgactgtggtagaccaggctacaggctgactgtggtagaccaggctacaggctgactgtggtagaccaggctacaggctgactgtggtagaccaggctacaggctgactgtggtagaccaggctacaggctgactgtgggaagggctcgcaaagaacagagccagcaacagggcacatgtgtgtgcttagtaccagagcttcacaaagcagnnnnnnnnnnnnnnnnnnnnnnnnnnnnnnnnnnnnnnnnnnnnnnnnnnnnnnnnnnnnnnnnnnnnnnnnnnnnnnnnnnnnnnnnnnnnnnnnnnnnnnnnnnnnnnnnnnnnnnnnnnnnnnnnnnnnnnnnnnnnnnnnnnnnnnnnnnnnnnnnnnnnnnnnnnnnnnnnnnnnnnnnnnnnnnnnnnnnnnnnnnnnnnnnnnnnnnnnnnnnnnnnnnnnnnnnnnnnnnnnnnnnnnnnnnnnnnnnnnnnnnnnnnnnnnnnnnnnnnnnnnnnnnnnnnnnnnnnnnnnnnnnnnnnnnnnnnnnnnnnnnnnnnnnnnnnnnnnnnnnnnnnnnnnnnnnnnnnnnnnnnnnnnnnnnnnnnnnnnnnnnnnnnnnnnnnnnnnnnnnnnnnnnnnnnnnnnnnnnnnnnnnnnnnnnnnnnnnnnnnnnnnnnnnntgtgtaatggtgtttgcagtagttttcagtctgtttacattcttaaaagaaatccttgtaaatctgattaaaataaaaaaaacaaacaaatgaattacacaagtcaatgagataaaatgtgccagcccatactgatgaaaccttagttgtcagacatttttaacctttttttaaaaacatattttaaaaacgtttatttgtatatgtatgtgtgtatgtgagtgtatgtgcatgtgagtgtgtgcatgtgtacaacaccatacgtggaagtctgaggacaacttgaaggactcacttctcacctttcaatgtgtaaattgtgggaatcaaatttaggtcaccaggcttggtgacaagtacctttacccactgagccatctctcaggccctcatttgtactcttaagttttaagtttaggactgtcactcttaactaggttaaattttgactggcagattggctgatctacttactctttgaagcaaggaatccatagagaagaataaagaagggttttggagaagaaaacatacagttactctaccatctaggctattgagctttagtttgaagtcacaacagacagtgggaggccagctcagatgtcagccaggccagtagtaggcagactaaatgtgtaccaaggcatcatacaaatgtagagacaagcaccttcacccactgagacatctccccagtcccaaggactttctttaagtataaaaaaaaccccggtatttcctctttctttaaatccataaggttgatattttcccccatgaagaaactgacgtgtaaatcgcagagatggccagtggcgaggcctatactgctgtccagatggaatggctgccatctgggattctcctcttactccatagcttgcttttcataaatgtggttttccttgtaagcgaccagtactcgagggggaaatctggtggtggagtagtgcaaacggccagaagctacacaaaatcatcagtgggcctggcaagggcnnnnnnnnnnnnnnnnnnnnggcaggtggaccgggagctttttactgcagaggatttgggtttgggggagatgatgcaggagaccctgggctgtaggccagtgctgagcttgggatgaaaagccaaagagaagccagtggtagaccaggctacaggctgactgtggtagaccaggctacaggctgactgtggtagaccaggctacaggctgactgtggtagaccaggctacaggctgactgtggtagaccaggctacaggctgactgtggtagaccaggctacaggctgactggtagaccaggctacaggctgactgtggtagaccaggctacaggctgactgtggtagaccaggctacaggctgactgtgggaagggctcgcaaagaacagagccagcaacagggcacatgtgtgtgcttagtactagagcttcacaaagcagcttgatgtgcgttgcctctaagtcagccctgtgatcgatcatacagggtaggtcgttatccccagtttacagacaaagatctaagactgagtaagttgcatccaatcacatggccaaaaattctacaggaactctcagagtacccaatcttctgactctaatgctattgaaagattgtgtaatggtgtttgcagtagttttcagtctgtttacattcttaaaagaaatccttgtaaatctgattaaaataaaaaaaacaaacaaatgaattacacaagtcaatgagataaaatgtgccagcccatactgatgaaaccttagttgtcagacatttttaacctttttttaaaaacatattttaaaaacgtttatttgtatatgtatgtgtgtatgtgagtgtatgtgcatgtgagtgtgtgcatgtgtacaacaccatacgtggaagtctgaggacaacttgaaggactcacttctcacctttcaatgtgtaaattgtgggaatcaaatttaggtcaccaggcttggtgacaagtacctttacccactgagccatctctcaggccctcatttgtactcttaagttttaagtttaggactgtcactcttaactaggttaaattttgactggcagattggctgatctacttactctttgaagcaaggaatccatagagaagaataaagaagggttttggagaagaaaacatacagttactctaccatctaggctattgagctttagtttgaagtcacaacagacagtgggaggctagcttagatgtcagnnnnnnnnnnnnnnnnnnnnnnnnnnnnnnnnnnnnnnnnnnnnnnnnnnnnnnnnnnnnnnnnnnnnnnnnnnnnnnnnnnnnnnnnnnnnnnnnnnnnnnnnnnnnnnnnnnnnnnnnnnnnnnnnnnnnnnnnnnnnnnnnnnnnnnnnnnnnnnnnnnnnnnnnnnnnnnnnnttaagtattaaaaaacccgggtatttcctctttctttaaatccataaggttgatattttcccccatgaagaaactgacgtgtaaatcgcagagatggccagtggcgaggcctatactgctgtccagatggaatggctgccatctgggattctcctcttactccatagcttgcttttcataaatgtggttttccttgtaagcgaccagtactcgagggggaaatctggtggtggagtagtgcaaacggccagaagctacacaaaatcatcagtgggcctggcaagggcaaggctctctctctctctctctctctcctctctctttctttttttttaatgaccccagtaaattctgagactgaaagcaggtttaatttttcccaatccacttttatacaattttaattacatgcaagtattaagagcaagcactacaataaggaactagcaaggaagtaagcaaagtcccgtgattactcccgtgacagttgtttccaagggcttgtcagaatgaccaaaatacctgagcccacttcctcacccaagcccagagagctggctttcagtattaataagtgagcaaggatcagacctaggagtgtctcagagggtgtgttaaaagtaagctttgggtttacgaggctgtgttaaaggtgagctttggatttacgaggctctgcccctcgagcctctgccctccgtgtggctgcaggtgctgtatctattcccaggctcctgagtcctgagtcaggaggctttgaatccttgagtcttgctttttcaaggcagctcttagctcagtgattgcagtcctctggtgggttcaggaagtggtgttttgtttgctttttgttattgtaaggatggagatgaccacattcaatgtctttaatgtattagagaaaaattcagaagtcttaagttgcgctttaatgataattatacaaaagtgggcatcatagtaagaccaagatattaagttgtattggtggctagattttaaaaatttttttattatgttggtcatgttatagaaattgaacctgcatttacatgtaaaaagttaattatagtatgaggcatatctgctcattcttacaattttactttgttttacattgctctgtagcagttcactgctcagcaaaggagagctctcaccagctctgctattaatctttacagctattaacacagcagaagtttaaagaaaatacttaccatggcctgtttttctctaccaagatatgccttatggtgaaaccgttgtgtactcggagccagagctggcgctttttactcatgctctagggagggtcttcatcagacctcagagttcttgtgcgcagtcaagcagctgtggcttgacagcggcagcacggctgaaggtggctgtggtcctgatccccagcagcacattgctaatagaaggcagtctaagtaccaaacattggtttgcattatgacttgagaggcctttgggcccacacaggagattttaacccctcgttctgtttacttacttaggtcgattccaactgtaattgaccagaaatcctttattttccccatggattctgatttttggcgacctcaaaagcatcgcggttcattgctacacggccttagaagagcaaaggtaggtccccaatgagccaggcagtggagtaactgtaggagcctcgtgggcccaggaggatggcagggcagaatgagaggtttctttgaggataatgaaaataactcagtgttagatagtgtacaactctgtaaatgcactaaatactactgtgaatgcacattcaaaaagggagcctactgatatataagttatatcccaaggaaactgctatttttttaaaggtgacatttaatttctagtattttcgatggggagatggggagaaaagggtttattcagatcacacttccatgttgctgtttctcaccaaaggaagtcaggacaggaactcaaacagggaaggaacgtagggtaggagctgatgtagaggccatggaggaggctgctcactggtttgctccacaaggttcgttcaacctgctttcttatagaacccaggaccaccagcccagagatggcaccactcactgtggattgaaccctcccctactgatcactaattaagaaaatgccatacagacctacctacaacatgtttaaaacaaaatatgacaaaataagctataataagaaaaagcaaaaaccatcattttgaaggcaacctaacacaaggaaaagagtcccaagatcaggcacaagaatcagagacccatacattctcacactcaggaatcccataaaaatactaagataaaagctgcaacacacacacacacacacacacacacacacacacacacagttcctggtatagatccagctaggccccgtgcttgctgcttcagtgtctgtgagaaactgttaattttttttataagagtaaatatttacattgtattttaaactagataatatgcatgttgtggtctgtttctataacttgatgttactgttttggatgtatctatagcatagaagtaaagtcagtcaaagcacctttctttttccagagttcagaaggaacactccctgctgctctgctgagcatttatcagctgtaggagtttcctggggccgtcccaagggtcttacatacagaaccccagcatctagagatcaagattctttgacttcttcatttcttctagctgtctgctgagtagcaatggggaaagaagccctcttgttttgttcactgtcttagtggaaatgcttggagtttctttccatttgacatgttgcttgtaggcatgctgtaatgacatgtattttgttgtggtatgttgcctgcttctctatttaccacatggggatggtggattttctccaaggccttttctgcatctaatgagatggttgtttctggcctttcacctgtttatgtggcagactgtgtttattgatttgtgtgtgttgaaccatcctcctgtatctcttggatgaatccaactggaccatggtgaataatcatgttgatatgattatctttgatgtgctattgaattaaatttataaatatttcattgaaaatttttgcatttgtgttcatcaaagattctggcctagaattttcttccctttccttttcttcttctttgtttggctttggtatcgggtaatactcgcttgggagaagaactctggtgatgttccttacttttctgttttgcaaaatagtatgaatagtattggtgttgagtctatgaaggtctgggggaatcctgcactgaatttatctggctctggaattcttttaattgggagattttaaactgttgcttatatttcattaggtgttatggatctatttaaatatataatttcttgacttatgtttctttgcatttttcagtttggtggagtataaatttttaaagagctcatgaggtctctgactttgcctccaagggagtatttgttgctgttattatttttgttttttagtttgattctggttccttctttgtgttagtcagttcagccttatccaaaggaatatcacaaactgacccaaaagaagtctgtctcttacagttatggatgctacaaaactcaatcaagatgctggcagattgggtatgttgtgagggcccatttcctagtttggcaataactccattcctgaggattccacccttgtaatctactcacctgccttgtcttgcctcctaagagcatcacagcaggctaactagatctacatacgcggagaggggtaggaacatgcagtgcatattgactagcccaaagcaatcataagtcatcttccttgggtaccagattttcatgattttggaaataacatgtttaatgttcaggacaatcctaaaaggaggtgttgtcattatctttggtttatttggaaagagactaaggtacacagtgggagaacacagcttgtgcatatccaagttggtattgtgaacctagaactgcagggccacaattctgtgttcttatccattgtgatattctttgcatgacagctgtttgggttcaaatgtccatatcgtaaaaggtaccattttacacaaagatacactgcctccatgggggaaggaaccctttttataagacacagccgccatggggaaggaaccctttttataggacacagccgccatggggaaggaaccctttttataggacacagctgccatggggaaggaaccctttttaaaagtgcctacacagctttgcagttttccttgctcacacttgccacagatgtaactggctagtgacctgcatgactttttttttcttaatgtttatcattcttttagataacgaccttaatgagtatagagtctatgctagtttgtttgtggctcccccattccagggactctgagtaaatagttattgtaggagtaaatgaaagcagcacggagactacccaagatgagctcatgcccaggtcaagcatccttgcggcaactgcacatgcacagggcagcccattcatgcctcggccatggtacttgctacattagaccccttcagacactgtggatgcttaccaaggattgttaagggcatgttggaatgaggaagatagatcaggtctttgctgccacagaacttacagttgagtcggaggagacaaaccatcagtaagagaacagcagacaacaataaatccctgatgagtaagaggcagtacgcagagtaagggagtgcgttcttcaccctccgtactgttcagtagctgctgctaccgttacattgcgagattttcatttgtttgttttggtgtgtatgtgttctgttaagaaatctagatggtgccggtcgtggtggtgcacacctttgatcccagcacttgggaggcagaggcagaaaaaaaaaaaaaaaaagaaaagaaaagaaaaaagaaaaaagaaagaaagaaagaaagaaagaaagaaagaaagaaatctagatggttcacaagaccagagactggagatctcaactcataaaagcaatgaaagtccctgagatcgagagagaccattgtaaaatgtatagttgttattgttattccataagaaagttaaactttggtcagaagtttacttttcctccgaggtttgagcaccagtaaatgagcacgagagacaggaagtatgcgtgctgactgctgagagcatctctgtgctccttggcactagggaagcttttttgagagaggcctgactccctggacaggttttatccctaaacattgatgacatctgctttaaaatgcatatctgcactgcctagtggcacatgcctttaatcccagcaatgagggttgggggggggggcggggggcaagtgaatctttgaattcaggtccagcctgatctacacagcgagttccaagacagccaggactgcatggaatgaccctatttcaatcaagaaagagaaaagaaggaggagtaggaagaggaagaggaggaggaagaagaagaagaaaaagaagaggaggaggaggaggaagaggaagaagtggaggagaaggaagaagaagaggaggaggagggggaggcggaggcggaggcagaggaagcattactgacaaaattgatagctcagagtctgccctgtggagttctgggaagctgcaggctcctgcttggtggaaaggcctgtgctgttgagtagttgtagaattcaactgggcaatcgcaacctttgatcactaacttccacctttgaaagtaggcaaactccagctgctattttatacattctctccccaaagtggatagctgtttttggaatttgatttcttgtcacacagctaggatgacaattaggagctgctcaactgtaattaaggatcacaactaagaattgtttcttaagcttttaaaaatatgaacatcttaagctttatgccataattgacagtttggagaaaaaaagaaagtttgtatnnnnnnnnnnnnnnnnnnnnaggaagcattactgacaaaattgatagctcagagtctgccctgtggagttctgggaagctgcaggctcctgcttggtggaaaggcctgtgctgttgagtagttgtagaattcaactgggcaatcgcaacctttgatcactaacttccacctttgaaagtaggcaaactccagctgctattttatacattctctccccaaagtggatagctgtttttggaatttgatttcttgtcacacagctaggatgacaattaggagctgctcaactgtaattaaggatcacaactaagaattgtttcttaagcttttaaaaatatgaacatcttaagctttatgccataattgacagtttggagaaaaaaagaaagtttgtattggtctttgaagcacagaagcaatgatggatatggttgagcacgactggaacctgaagtcttatttgtgttatcagcatttcttgttgctgtgacaaaataccagacagaagcactgtaaggaaggaagggcctcgtctgtctcaccatctgaaggacagcccatctgggggcaacagcatggcagccggtgcagggtcatgtgtgtgcagggaagctgggagcagagtgctgctgctcagctagttctcctttgtattcagtctgagatcccagcccacaggatgctgccacttctgtcagagggggtcttcccccttccactcaaatatctagaaataccctcatggacacaggtgtgcttccagggtgattctaagttgacagagaaatggacccttataatagatactgtggataaatcaagtctctagacttgcttattagaatactcatttcatttttcgctaaatttatcagccatacataatttaccagcaatgcatctttactgcaattataacaaatgaaagctgaggcacaaagatgctgaggcaaagctaactaccaaaccgcctggcctatgtgctcctccagatgttggctttgtttgcagtaatacatctagtacatggacatgagcagataagtaggatttggattgggtatagatgtttaaatattaactggatgatggtgataattttggacagggtctcactatgtaagtcaagctagcctctagctcactatatcttggcttcccagagctggtattttaactgagtacctgatgaggcccagatgaagcattcgattttgaattgttaaaaataaaagatgttattttttcacagttgttatatgaaagtatgatcacagaattgttctcaaaatatatgtagttacaactataagcaactgggaaacaaagcagtttacctgccacatgacatatttctgactttttcctcttgactatccataacaacagaagaatgtgaccttgtgggttcagagtggattttgaagagcttaaagtaaataagatgcatctttggtggttttgttttgtcttatagatatatgaggttttggttttttgttttttaatctctaaatggtatcacatgcctgtggtcgcacctccttgggaggctggggaaggaaaaacatttgagccgcagagtttgagaccaatttgagcttcataaagagattctgattaaagcccaaaccaagcaaacaacccccaaaacaagcagcaagcatggtgcatgccacatgcctatattgggagttggaggcagggggtcaagggtagcctaggttagcggagcacgtttgagactaacctgtgtcacatgagacccagtctctaaacaaacccaaagtataaaagaaagaaaaacttcattgccgttcattatgtctttgcttttgtctcaatatagaactaatggattttaccccaagagctctcaataacacagccaggattgtgtctgatgttattatagtcagaccactctaccgcttaagtgccagggtgcccctgtttgagaagcagagggttgtgtgacatcaacttctttatcagatgtctctggaggcccttgtatgtgctcagcactctgctgggtccctgtttttctggagataatgtcagtggagaagataagtagggagacaataataaaattcagtggtaagcgctgtgatgggcaaagtatatagaattctattggagcgtttgaagagcccccaactcagctgcaagaggagtcgatttcaaagaaagctccctagagctgaggtctagagactcaatgggactagctagaatggtatggagacaatgaaggaagagtgtgtggagtgagttcccaggcagaggagcctgaattaatacaagactgggcacggcagggcatgagtgggaagagaagcaagtatttcagtatgataagcagagtatgccaagagctagaagctccgctcagatcacagtgtgctcttctgagcttggttcacgagtctgagtagtgtatggaggtggggaaaataaaggctttgcagcaaccacatggcaataggcctcctccactcagatatatatagcaaacacactgcttcaggatgctgctggcacatctccaccacaacacacaacagcgcaggtgattccagcttctctgtcctcatgtctgtgtgtctgtcattcctttattgcctcattgcttcagtctagccaacctcaaagcagtgcaggtcatggcacagcattataacacaaacagtctacgaacggccactttctccacttacattttacagttgttaacctttaccatttttgcttcatctatttttactgaagtcttttaaagtacagacctaatgacatttcacctcttaatgcttttagcatgcatttttaaaatgagctttttcccacttgcaataccattatcacacctaatacagtcaacggtgcttgtgaatataatacatctcagtttatactcagattgctcctgtgagtccccagatggcatcccctgctctttatcacagccagggtctggggagggtttcctgttgcatttatttctcttctaaagcagggaaagttcagtttgtggctgtcacctgtgtgtagaccatttggaacccagagcagactctgaatggggcactgcatggcttgaacttgtctcctggccccaacttttactaatcacacttccaaagtcacttgctgcctcagtggcctggctccttacatgcctgatgtggggtcaggacaacatgcatcttgtggggctgcagcaagggtgagtgaggtaacaggggtggtgttcccagctatgctggcacacagtgaacactgagcagcgcagggttcatgttagtatttgtgattagtctccaccgacctccaaggtatctgaggcacgagtcacgcatcccacagtctaaggaagcatcctatttggggtatggtaggccagaaaagcagagcacaactcaacaacttgaacataaatatacagcacattggcttcttaaactgaaggctgtgttcttaaatataggtggtgtcttagtcagggtttctattcctgtacaaagcatcatgattaagaagcaagttggggaggaaagggtttattcaacttacacgtccatactgctgttcatcaccaaaggaagtcaggactggaactcaggcaggtcaggaagcagaagctaatgacatttccatgagaagattcaattacgtgcatatttttatttatatatatttttccagagatgtaaactactgccaagacttactttttacaatcacttacttattttgtgtgaggtttggggtgcagaggccatggagggatgttacttactggattgcttcccctggcttgctcagcttgctctcttatagaacccaagactaccaggccagggatggcaccacccacaatgggctctccgccgccttgatcactaattgagaaaatgccttacagctgaatctcatggaggcatttcctcaacagaagctcctttctctgataactccagctgtgtcaagttgacacccaaaaccagccagtacaagggggtcacagaaaatttgacagttgtgaaaggttcctgaaaaaagacagaatccagattgaaacttgaacacacatgcctgggaggcgtttctcccagccttactctctgacttgttgcagtaatagtaactgcactcgtgagtcacattagaattatgtgctaccttgggagacttccagactcatgcttttacacatgagcttagttggtgcacataggtactatacattctttgaagaggtttatagttacagtgtggctaagttgtaactggtaggacatgaatccttctggattggagttatcttcaggcctcagatgtaggcctgtaagcccatatcactaatgacatttccatgagaagattcaatccagtgcatatttttatttatttatatatatatatattccagaaatgtaaactactgccaagacttacatgtgccaggatgcacatgtggagatgggggtgactgtgggagtcagagtccattttctcactgtgtacatcctggagactgaactcaggttcttgacagcagcgccctctggcctgtagtgtatagggtgtatagccttgcctgcctgctgcttagattgactgtagcgtgtgctactggagttaactaacatctcgaaagcggcatctcaatttcaaatgctgtgttagcctgcttgccaggacagctgctattctctggctactaacaattaagaaacataattaacaaggggccacggagttagttgcagcctgtgtaccataaacactggacagaagttgggtttgttggctttgaaaaaaaaacttgaagatgctataggtcttacactattagccagccaaggttgaattctttacgtaacataaacagtatataatgttattcagttagtatcaggaggctgagtgtgtgtgtgtgtgtgtgtgtgagagagagagagagagagagagagagagagagagagagagagttagttcaaggagaaagagagtgttagttcaaggccattttgagccaatataacaggactttgttaaaaaataaaaaattggggtgttacaaatgttttgtgagatggatgagatggctcagcaagttaggacccgagccaccaagcctgatgactaaatcagactgcctgaacccacattctagaactacttcctcaaagttgtcctccgaccttcaccacacacccctgtaacccacaaacaaacacacaaataaacaaataaatataagtaaaagtccttaaagttgcccagactgtcaccctagacatcccacctgcaagctaatataataatcactgcggcagattttaagaacgtgagcacaaagcttagggcttacctttcctcatgccacgggctagcctctgcctcggctgtcctgggtgcagtgctgctatgtgctgtgggctgtttgtgggacccacagttctgagacaggcattggacagacagtgggacagggcccttacagcagtgtggaaaaccggccctgaactggggtcctggctgtgtcggaaccagtaagtacatcacctcagagcatcccaggcttctagcaactcttaccgcttatgaggaccttcaacccactgaccttgagtcacttccccctcaactagttagactccactgtcagggaggagggaagctgttttctagccagtgtgcatccctattcccattgctgacaggactccttccatggtgtgtgcatcctgccatagctaagataatccatttctcagcttccctgcactgcagtgtgacagtggcacccacttcacctcagaaggactgagcagtggtgccatcagctcatctgtgtgatgaaggggacagtcacagatgccacatctctttgccattccgacttcccccttgctttcaggtaaaaacaggcatggcatttgaagccataacagtcactttgcacagtgacaagaatgggggcagcctctgggggcagcgcagcaggagaggaaaggagccaggtccctgatggcttctctgagtaactaaagaactctggcacggggacaagggacccagaagaccctcccacccttaacatcagactcagtgactaagcactacgatcatactctcagaatcctggtgtgtctcccccctatggctatctatctcccagctgctctgggtctgcacccagcagcagcacgtgactgggccacatctcacagtgacgtggactgccctgatttcaacttcgtgtgtggcttccaggtttcaagtgacaccagactcagcccagaaatgctttcctttttgtgtacccaaatcacatccataccccccacctgttccccaatttgcagcaatctctcctcattactctcacagtcactgaaagggaagggagcagatgacctccttctgctagccacagtggaagaaagtgttcctccagctgtgaagaccagcctcctctgactagtttcccccttctcaaggaatcccagatctttgcatgactgattcagtttctccactcaggtctcatgtatggccatttcctaagaaggattattctggaccgacaaacccaaggaagcctcccattacttcccatcccagtgatagcaagagacctggggtcagaggcaagccaaacccatctcccactggcagggctttctgcttgaccgttgcttgcctacttaccttgagtggcaggtaggcggctggcatgtacttctttcaactttaagcaccagttagttgggtgagacagcccctacttacttgttctggcacaaagtgagctgaataagtgtttgccctcattcttcagttctcagaaaacaggacagacacctctggtaagcagtcttacagctttgtgaacttgaggctggagtctggctatgtaaaatcagcacaaagttggtgctgctgctgagcctatggcgggtctctgcttgttgtgccttctccccctcacagggaggcaaggagggaagccattgggaacaggatgttaaaatgaaatgctcataaagtaaattaaatgctttaactaaaactttaatgacgtactaagaaattgtgttgtttaatagatactagtgtatagtgaaatgcacatcactgtcacctggctctaacagctaccatgattcctgccactcttcaccatcttccctccatccccatcatctgtgggcaaagtccattccctttctctctcagcagactctcccatggcccaggctagccttgaactcaccattcagtggaagatggccttgaacttctgatccccctgcctccacctctgcgggctgggatcacaggcctgcgctgtcacatctgggtttgtagtttctttactctcttttaatgatatatggttgattagtaaatccagctccaatcagcttggtctgcccgttataaaactacagtgttctacagagttgatctcagtggccaccgatgttgcctgaatgcccgattacagtagggattggagtgattctggaactctgctattctttcggcttttatcagcaactctaaagagcttttccttatggagggaaatggggagcagataggattgtgatccactgtgtacatgcatgaaaatctcaaaaataaagaaaacatataataataataataaagagcttttccttagacatgcctggtaagtaccaaatagacgtgtaaagggaagtaggctaaatgcttaactcccttttattttccaaattccaagttaatttgttgatgttttcattatgtattttggaggatgactattaagaactcacgtttgtaaaatatatttgaagtgtttcagtctgcttcagtcccctcccccaccctttagccagtaagctctcctttcaactttccccctgagcagcactttataatttatgagatattcaacatacagtatcagtcatttgaatcttacaaatgaccctgtgagtctcatattattccccatgttacagatgagaaatttaactcatgtggctcaaactgggactcactgtctattgcacttttcgatatataaaaccatggtttgagaaggagtgaaaagtgacggaatcattttcctgtttgtcccttctccggcctcaagatttacatggaagacatcttttaccagtgggaatatgacattaagcaatatccactttagaagacattactcggggcagacactgttgagaacagtgctctgatgataatactgtaacttggcaaatagcttctctcaactttgtttgtgaagcatttcaattttgattactctgtgtgggagctactgctcagatagatgcgcgttgttttatggtctgcccatgtctggggagctggcattacatgctgcctagtgtttttaattcagaagttcttccagaagcaaccttagcctcttgtattccagccctagttttaatagcataagctatttccttcttatatagcgttgtgggcacagtaataaaataaataccacaaaatcactgatgagatgaaaattgagctccctgcttctgtgcagccatgtaggtaaaacagtaattggctctgataataagttttgttcttacaaaccaaagtctaaatgagagtcacatttgatatatctgcttgtaattactatcaaaaggagaaaaatgcaaattttagatagtttagcgagtcaaaatagattaaacaaattgctgccttttcttgaccaattgaaacatttcttgttatttatgatatttctcttactactggtgaaggatcatcttccagagagtggttttctgcttaatggaatgattaatttgcttttggtttttaatctataattttttagaaaaataatcccttattattggatcttatattatagtctaagcccataagaaggtttttgaacacacctactgcaaaacagtaagacagcattgggtctacttaatcatgactttcagtgaagctactttcaatattttatttattgttgggcatcaaacccagagcctctcacatgccaggcaagtatagactattactgagccacacccctagtctgatatgtatttttacttagttttacattttatttatttgtgtgtgatttgcatgtatatgcctgtgtgtatactatgtacatgtatatgtgcatgtgtgtccttgtatgtgcatgtgtgtgtccttgtatgtgcatgtatgtgtgtgtgtaccatggtgctttgtgaagaggccagaggacaacctgtgtgagctggatctctcctccagcctgtgagacctggagctggcactcctgtcgtaaggcttggctgaagtgtgtttacccactgagccgtcccactggcagcgttttcttttatgttactttattatttttgagacaggttttcatgtagcaaggctggctttgaatttctaatctttccacctgtaccttgtgagtgtaggatcataagcatgtgtcaccatgcccagaatccagtattttaaaagggaaatcaagtcatgcaggcaacatactttcactttgataagttcatgctttaataccaacatggcgaagataaaactattaataattttaagagaactgttctaagagcctacaataagaatctgtattccaacacacaatatctgtttacatggtgattttgttctggaatatctgtgcctggagatataaaatagacagggaccacctgggccttaatgctggtactccagcagctctggtcatcttttcccaatccagtcccgaagccacacaaagttgatggaatgtaataaaactaagaaaggctctctggtcccctgagccagtgatccaagaattaaaagttctaacaaagctgagacctgatggatgaagccattaccatcggtcgtatccacaatccacattcttaaagcatcctaattacagaaaccacatccagtcaatataatacatattagcaatttcctgatccttggtaggatggaaattatcctgaaagcttaattaagaagaaaaaattatgttcaggtattaatttcaatttaaaagaggcacttggctctctgcaaaactgccagaggagtgctgtgagtgtgggttaccacacacagatggaaacccatctgtaactgggctccacattgcttctgttaccacatgcactcaaaggagaaagtcacaaggcatgccttgcttgtgacctgtgtctccacacgggcagttggcgacagttatttggaggttcaattattctggagcccttaaaaacagaagggtcgtgtggatcttgtgttagctcgtctggacaggagctgtctgtccctttgctacttttgtagcctgcctcttcactttgactcagactgttgtgagtgcttaggttcaaagaaatcagtggattatgaaccattctgttaggtgactgcaaccattgtaacacttgcctcagatcacgctctgaacaaaagtatttgattgaacccaaatcatagtttctagttgttcccagtgcctccaagttctttaaaattaaaactcacaaagtccagatattgtgctcccatatgtacaaatgtacagaatagccttatgagtagagacagaatgtagtgtcccagtggccactgggactggggttagcaggacaggggagcatctgctaataggtgtgaaccttcattttctggaaataaaaatgttctggaactagatagtagtgagcttgcttaggttagcaaacaaaatcacaggtttgtaaactatactgtggcacaaaagctgtagatagatagagagagagatggatagatgttttataagtcatatatatacgcatatatacgtacatacatacatacaaatatacatatataccagtgattcttgatgccatgatcattagtgacaactgtcatcctaacctgaagtcatagactgctgtggctcagagcagcaccccatgagagtgtaacacccagcttttgcccttgacaagcaaataaactggcttccagagaggcgaggtgactttactgagtcctgcccagcaatccaggctagagcagtcacctagatcttgtggcatcttcccactgccgttctgataggaatcctttacagtgaaaaacaagtcactgcaacaagatgctttcaatttttcctaacgaaagcgctagttacagatggccaaacccccgcagaggtatagacgaatttgttgtgatagatttatcaggtccaaaccaagagctacctgtaagtgtccctagaggaacgtggccacattcacagaccaagagagccctctacctgtgtgtctggagtatagattttattcactaagtccttgacctggaaagccagaaataaattgagatgagacagtcttgccctttgtctgtgctggttgacatggaacattatttttgagcaactgaatgatgtattagtgcacacacagagaaaaatcttccgtgtctgtgaataaaaggaatcaattggtagcctcaataaaagatccaattctttttctgtgagaattacgttaaagtccttattttccaagaatttatattcctctgaggatatacaatgttagtttgttcattctacataaaagttacattgttctttgtttcagccaaagatacagttgactacgaaggtcatgcaggaccctgagaacaagcaccacagggctgctgtaactgctagctatgggatcagtttgccacatattaaccagaggaaagcccaggtaagtaatgagctgctcttgcaaattgttaattctaaatcaggtctcaagtcactgtcactggtcagtgggggtgagacagaagacagattttaagtaagactgattcttttgtccttgggatttttttttttaaacaaaatgaagtggctattattctgtctatagtaagtaatgactaagaaaaatatacatgtattttaaaagatctattccagttttttgttgtgattgatactccttaaatgatctagcagcaaaatctaacaggcaggaagtgagttgacaacaagaggaatggataaaggagtttaggatgttttgcacaatagactgaccactagaaaaagcaaagcaaagccacatcccagcagccttcctagtagtgcacccacgtttgatagtgcaacaggcaagcaaatgttccaacccaaagtcagtgggtgcatctccgactgcagccaagtgctagaggcaaagctagaggcacgtgtctgtcgtctgccctccggagcagccaacactgctggttcctggctgaggtgccccagggtaagcgctggcctcttcctgtgctgtggcttgcctgggacatctagaagtggtgctttgttttaattagaaaactatttgagaccatttttaatactaaaaacaatttttaaggtgaaatctatgtattttaaaaatacatttataacctctggcttctctcagtgctatatatattagtgaaattaaaagtaagaataagattacttttagaattaaaatttccaaaccatttctaacttgcttaattatcatagattaaaatggtcccagtttttttttgttttgttttgttttgttttgttttgttttgttttttgtagacttttcagttgcctgtgtcacccatggcatttggacacgcttggtctctgtgtgcactctatattattcttacaggtttggattaagaacactagcctagaaatattttctagcctaagaaataaccagaaagttcgatgtttttattcctgttggaactttatttaaaatgtcagtgtgactaatgtgaagaggtttttatctgcttcccaggagccccaaagccctggaagtaaaaatattatttctctggctgcacagacagcagcagatttctcttgtgctgttgttggttttcctcctccatctagaattaatattggcttagctggcggagtggggcagcttggcagccccgggcaacttgctcgtgcgacagaaactttgtgatgagggcgaagtttctagagacctactgagagactagaggattatgctttgctttatgacgccaatattcagacttaaataaggaattcaaagcagctctaactttaagatggagtcttagctgttcgttatactttaaataatttacaagaaggatgagcagcgagggtattattcccatgtccttggacaacaaggtggtgagagaggtcactgctcggtgtgatatgttaataacatgtgtttacttattatatgaaagattctcttcatgaaaaaatgacctcatagaaattgacagcaggccacgttaaaagaaacatatacattgtgtcaattctgatcaaattattggccttctcacccagatcgttgggcctctcatttatgttggtcaagatatcagatgccatggggcagttaggtggttttggtttttcttttgttgttgtctttttgtttttttatttatgaaacagaggcattgttcagaaagctctctgagggaaagtacttaggtatctggtttttaaaagccttttagcacatctggggataaaaagcagctgaaattcacttcttttttatttaaaaaatgtttttaaaagcacctccccaaagtgtggccacatgtgtgtcacagtgactcacagttaaccaaagtagcagcggcagggccaatgtttctgagtgattcttcacactcagggacgaggcgtccgggcttctacgttagtgaaaacagaacagcttgtcaacagcctgcaaaaaatccaggaggttttgacaagcaaatatgagtccatagtcagtttgcatccttagttctggaagctggtgggtgttttcatctgatgaggaggtgtctcattcttcaccatagcaggtaacagaagatattggtgcattaagtacacacatacatacatacacacataaatacatatacatatacacacacacacaccacactactcatatcacagtccttgcttttagaacattgcttttttgtgaccccccccccttttttttaatacaaaatcaatttctaaaaaaaaaaaaaaaaaagcgccaattgcaaactcactgatggttttaggatcttaaaggcaccaactaaaggctgactaacacagttccatgtgtgtgccgggttctcactgggctcgggaggcagcaggcaagcgctaatgctcttcctgtcagctcgcagcatctccttctacacagaccttccagtgcagtgcactgaagagctgcagaaaatttgactttgatttatttatttcaaataaaaagggtttcttaaaaggcttgaaacatgtaactgttaacatgaattttaaaagaacgattatgaatgcataacaaaatagccaaacaaaacaaaataactctggttacaactgttatgacctagaaaagaaacataaaagcatttttctttttggcaagctatgagttgctggagaattataccagttctttggtcccactttccaaataaataaatatataatgctatgtaaacttaggaccttttatttattcatgaggttggatttaatgctatgatgacttctcggctttatgagtcgtacgttatacagtgcttcccactaacttggttgggtagcaagcgcacctcacaaatcaaagcttcattctttactgtttcacttggggtgtgcagagcaattgctcccactgaaagcacaatcatttctgagatgataaagtaatgcagagtgatacaattgtgttaatgtcaaacgattagaagaagtaccaggagcgggggtggggcgatttcaaaacatgattgtgttttaagcccatgcatatggccacaattacagtcacaacataatttggcaacagtagcagaattagatttaaacaaattgatgttacactgcagtaattcagaacgagcttgttgcatttataaaccataacaagaagcagagtgaattaataaacccttcttgtcactaaaaataaaaaagggaataattgctgagacggagctaacttaacagatgactaccgtcagcatccttccagcctagatgtggcaaagtgaaggtcacccccatttcagatgacaaagagggaacattttgttggtaaacaaattaatctttggaaaggtcaccatttgtttgaagtctgtatccagttcttgtcatctggaatcagagattgactgtcactgcagcaggcaggggtgcaggggaagccgacagagctacttctgtccgtatcagcattctttgacaaaactccgcgcctgattgtgatgccatggactgctggtttacagctgtctccggacaggaatagaggcccgcccctgaattccaataagatgggcctgcatattttgcctgctgtacgctggccctctgcccacaagtaaaatgtatggtagttcaagccagcaattatctctcttacttccttctgtgctgcttctggtccccttttgcaaaaacagatgtgggtatttattcaagttcggtgtctattcttccccacacctgccagggcaggattttgacagaggtagagtttttgggagccagcagataacaatcgggtgtaatttttctgagagtagagttttttgttttgttttgttttgtttttaaggaaatggtgattctcccccccccccccccaggaaatgtggagtcagcatcttgatccccctccctttccccaggagcatttggtaaattaaattagttgaacaaaaggaaatagctttaaagacattctgaaatgccacatcctatttatgacacacagttattacccaaggactgcgatagcatgtgtggtgtctccacctctagcagttgcaggcagccttctcttgaggctgtacagagtgtttttgtttgaaagtgtgcctcccgattcacaagctggaaagtgtatgtatcccaccagtacagcggcactggcggtggcgacggtggtgtgctgtcttgtatatgctatggttgttcttggaagaatggaagatctcaggagcatcatgcggcactggctggcgttcagatccttccttaaagtccactgttgagggagcatggagtagccattagaagctgtgccccccaccgtcaacggtatttataaaacaccaagctgtatgagctctgatttccttcaaatcgttttggggaagtagtagggggagatcctgcactcattcccccagccaaccctatgttggactcacagcccttcttagcacatagtgtggtgattctgggccagactgcctctgtttccttatatataagctgcactatattgagtgtgtctatcctgtagggtggcattgagacacaaacaagtgagcagattttgctgcaaagaagtgctctgcaagcatcagttcttactatgagcagtgctcacatactatactgtaccattgtttcacactgtcatttaaaatttacatttttatctggaccaggggagggtaacagaccattgcagagggccattccagccataccatttaatatttcatctaatccttttgtctttcttatacaatggggacttcatttatatgtttttcaaatcctccatagcacccaccgaggctttatacacaagaggtgctgaggtgaggactggctcgctctcttgtctgtctgtccctgctttgcagctgcatagcctggtgttgaatgccaaagtgagtcccggggagcctgactgccccaagtctcctcctaaggggccacctgagagtttttcctagtgaaatgcccttgctcctggattcacaatacagccttgccactgcctagctgttccaaagccctaccattctcacatctctgttttatggggaggcaagctagatggggtggcaggtggtggggtggaaagggtttggggtcaagcggaacagggttggggtctattcttgaaccctaggtaagcaaattaacctcctgagtcccttagcttcttctgcaaagccaggataaatgatgcctgctaggtacagctgttatggggaccgcagaaaatatctgcacagcactggcatgtaataaatgcccaataagactcctgcctttctgagaaaacgaattagcattaacaatctatttccttctcctttcttcacacctgtgctttcagaaaagacccagattcaactcccttcccttccagcataatgagggcacagggcttgctgttctggtttccaaattgtagcagaaaactgcagtgagtttcagggaggttgtgaatatttaagtcacaatatactttatggcaaatactttaaagtgcagcaaagaagaacgtgtttattaagttagataccaaatgacaaagcattaacccaccaggagagtaatgtgtgcacatgtgtgtgcacactgagcacatgggtgtgtacagttgagtttcttacaagttagttttgtttttaataaaatagattgtagttttttactggtctggacgtatatgatggtcatgtacaaataaacacaaaggttaagggaactagttttgtgtgctggagagttggcttggcagttaagctcacttgttcttgtagaggacccaggttcagttcccagcgcccatatcaaggctcagaagcatgtatcagttcagcgccagtggatccgaagccctcttctgacctctgtaggcaacaggcacacatgaggtgtacgcacatgtaaacaagacattcatatgcatgaaataagtacatctttccccttttagcttagaaggttaattttcatgtcaaggcttgatccctaggacacaaacaaacggatgggtaggagcagtagaacaggagccctgcagcacttagaaccggggggtcctctgacgaacaagagacatcaagtgtctcttcccaatggcccctcttccttttcaagtacattaggaccttctctgtcacatattcaccccattttcaagaaaaatctacattttggattggtattttattgttggcaagaagcgcgtgctgggagccctggcccctgctcctgctgagcggcttctgtgctgtgaggacagccgttgctttattttgttgtctagggtagaaatgttactttgctgattgtggtagatatccaccaacaataaagcaccatttaaaaatggatatgtaatatccaaagcaaaataagactgctctagaaaatagggtaaataaatgacagacaaggttctaaggtaattgaagaggaagaggggccattgagaaacgacccttgatgcaagtgctctgggcccttcagtcttttgcttatatagattgtccagtggataagatatggtactaagtgcctcacacatatttgatctatttgacctttgtacctaccatgtatatgaccattttgcagatgaggaaactgaggaaggacacaccttgtctaaggctgtgtagaaaggaaggatgatcaggaccaaatttatcttgaaatccactcttcaggactctggaacggagtcactcccaaccagcgcagttattaaggaacaggagcagttactagatgttagggattctatctttaaaatcattccctactgttctccagagtgtctggagcatttcagctaatgggactcctgaaactatagagccttagcaaatcactggctatttaaagtgatttgtcttttcactttgggattttaaaatctcgtgtaagcaaaataaaatatataaataaattataggcaggaatggctatcaaactacagttattacaattcttgaatttataatctgccttcatactcatgtatatatatatatatattttattatataacatctgagtgcgataaaagtatttatatactaaacatgtacatatacaagattttctatatttcttttttaaaacaaacatgtggaattgagctgacaatcatgccaaattcttatgagatttacatttatgtgtataccagccttctgtttagctgcagtggaaagcagggtctactgctggaaacaaatgtgagaacctttggtgtggagttttacctctccctgtggattctccttttcacaagagtaaatcctctatttaattaaaaagaaggagtgaagctctgctgagggatttcaagctcgagtgaacagagagaaggaagtctggggtggcggtccacaaggaaactttacactgatctgaattcaccccacactggcagctacctgctctcaggactagaccagtcctttaagtggcccactttcactctgagcatttgagtctatgctaagagatagtatttctgacctcatatcatcattttgaagaaccaacaactaggtagatgtagaggctgaagtctgtctctgtctctcgcatatgtgcatgtgtttgtgtgtgtgtctagaggccgaagtctgtctctttctctctgtctctgtctctgtctctgtctctctgtctgtctgtctgtctctctttctctctctctctctctctctctctctctctctctctcatgtgtgcacacacacacacacacagggggtggggctgacatagatgataagtttaatgcacaaagggatgacagaattatattttagtataatcagcttctgtttattttatgttaaataattagtttgtttttaaggcagagtctggagtagcccaggctggccttgaactcttaatcctcctgtctctatctcccaagtgctaggattacagatgtgcaccaccaaacctggtttgcctttccttgcattttacttcatacatctacaaaaattactctgagaaggggtgtcataggatttaccagactgctgaaggggtgactcccctaagttagaactttcttgatcaatcttttctttcacaaaaatatctaccatgagacaaggaatgcattaaaacaaaagtctgccaaagttgccacattgtgcgattgttttggtgcctaggatgaagctgtgttcttcatgtataaaacagtcactgcacttagttgatgacaagaccttgtgtgtgtgtgtgtgtgtgtgtgtgtgtgtgtatactgcaaactcaagctttttataagaacgatactttcatgagaaagaatagaaaacttcaggctctgagccaggcacttgggaagctgaggcaggaggatcactcaaatttgaggccatcttggcctataatgtgagactctacctcaaacaaatacacaaaacagaacaaaaacttttcattccttgaccttgttattgttgcttttgtgttacaaggatgagaatggagcgatacaaacatgttgtcatgagttctatttaaaatgaggggctagagagatggctcagtggttaagagcactgggtacctctgctcttctagaggttctgagttcaattcccagcaaacatatggtggctcacaaccatctgtgatgggatctgatgcactcttctggcatgcagacagacatgcagacaaagcactcatatacataaacaaacaaacaaacaaacaagaactgaaaccagaaacagttaacagagcaagcagagaaactggtctggtagtagaatggctttcatcatggcccagggtcattttctcctaagaggcacttgagatgaataaatactattgctgtgctctccagtcttctagcccattgctgcttaaactgtacttgagttcaagtatgcattcttagcctctacaaacctctctggcagaaaagaaatgacgataatgtggagcagttcactggactttaaagcatgcttcagagtcacacatgtaatgtaaacccaagagatatttatttgacggttagggtctcactgggctaggggtcagggtagagaatgtggattcacatcatcttttgataatcaaataacactacggtggaaatgtttagagtaaatgctagatgaaaagcctaaaatcggccatatacatacatgatagagggaagggccatagacccgagtccaaggacttagatttcagccctattctgaatcatggctacaagccaagatccgaatctatcacttagttttgaaagatgaaatcttcctgcatgtgtttgccagtgtgttctgtgtgtagtctgcacgcatatgcctctgtgcatgagagcctctgtcaccagctttcatgaaataggggtttttgctacaccaaagctcagtgtttgggagaggccggcaggccagtgggccagtgggccagtgggctcctgggatctgcttgtctgtgccccaaccccgtgtgttagaggcatgcatagccatgtctaggtttttatgggggtgctggggattcaaattcagatctttatgcttccatggcaagagctcttgtcctcagagcctttcctcagctcatggtgtcttgtttttatactgagaagacaaaatggcttgcccagaatcaccataggggccacggccctgtctgtgtaactctcaggccagtgctcgcttgatgcctctggaatggccagaaagcaagtagtgaccgggtaagaagctggatggaggctgcccgagcagcctcgagagaagtgtaagaagctggagaggtgctgtgtgctctaggagcagacgtggtgctgccccagaggccagggtggacactcagagttgtctcggattttcccaaaagctgcacttggagctgatggacggccttggatgggcctctgaaatctaattgtgtgatcgcagtctggagcataaaaggaagggctttaggcacagggctgaaatgagatcgcttcggctgctctaactgaagggcatctttagaattcttcggaacaatctctgccccttgatgtcctcgttgattattacactttatttcctctcccgtcggctataaagcaatagtactttctggaatcacattatctcctggacttgttagatgttcatgaagcggcctaattagagttctgcaggcacccctctccctgataatttgcacaaggctttgttctcttctatgaatacaccgctctagcaggacgccttagatttcctcccaaacctacccttctttctgtcttaatgctgcatgccccattgctgccaaggactctacctgtgaccccatctgtcatttccacatgccatcccctcctccagaatcagccaaagcaggactagttgaggctggcataatgtagcaagaaggacagacactgaggatggtgggcggttccttgcaaacactctcggccctccctcccactgctcacgtccacagtaccgggtcccactccgttctgcagagggggagctccttcctgtcctgacctcacagcagcttcctgggtccaatctgctcaggcacagctgtgcccaggagactgactccatactggtgttttctacaatatgctatgctttcaaacttattgtctgtttgtgctaaattggaaaaaaaagggcggggggatgttcatagactttttacttaccagctttattccactggaaaaaattttaatctttagacaatgatatttaaaattatactcatagtctagggtcctggacaggcagataataaatgacaggctaggcctgcagtactggggcattggagctaggcttcctacaggtcactgcccctttagttatacccgtttgcagctggactatcaaaagaagctttcaagttcatgttttgttttgttgtccctgaaatttccaagtttttaaaaatatttgcctagatgactacacggagctaggaaaggcgctcagctgggacagtacctttctcaccagcatgagttcagtctccaactcccatgtaaaaatgctgtgtggtagacacatccttatcaccctgggtttggggaagtagaggcaggagggtcctggggcttgctggccagccagtgtaacctaattgctgatctgcagaccaatgagaaatcctgtctcaaaggaaggtaatcatactaacagttttcctctggcctctctacatacatgtcaataaacatgaacaacatgcacagccacacacacattaaaaataaccctgtatagttcaaagaaggcagtctctaggcccaacatgtagatctatcctttagatgttatagatttggggtacaaataatattggtatcatctggggaattggctggcagctaggaccccctacaaaatgtgtgtgtgtgtgtgtgtgtgtgtgtgtgacccttaacttacaagattagaattttattttgcctaaattaaccatctcattgataccacaaagccacattgaactacagtggttaagcagactaaacgttcagtctgatctgatgagcgtagaatatcctttattagagagccactcagaaagcccagtcagaaggctgcccagtgagccaggaaactgacaaatgaccgtgagttagataaccttcatgaggagcagcatcacaggtatacacttgggagtgcacatctgtgaagcctctgctgccggggatgtgagtccaccctggaaagaaagcacgtgccgtgtggacacagaaatccacgctgacttggctttttatagtaagtaactacaatctgcttggattggcagtgtgacttgtgttgtgccagctcctgatatcacagtaggccttatagtgatggtgtcaagtttggactggttaagtctcttcagcttagggctggagatatggcacagccagttaagagcactgactgatcttccagagagccaaccttcaactcccagcacccacgtggttgcttacaactgtttgtaactccagttccaggggatctgatgccctcttctggcttctgtggcaaccagacatgcatatgctgcatagaccaaatgcaggcaaaatacccatgcttggaaactaaaactaaattaaaagatgccaaagaagaatcttcagcttcaggaagctaagtcacttgatccagtaatatcattaataagcgggagaaagacagatcagaacgctgtctaacaccagagcttgtgctcctgcccattgcttcccattggcttccatcttagttacttttctgttgctgtgataaaatgccattcccaaggagagacaaagagttggctgtggcttccagctccctcctgtctggtggcaggagaaggaccctgagagatcacatctcaccctctagggaagctaactggaagaggagagctaagctcccaaaggccccctccagtggtatgcttcctccagctaggacgcacctcctaaaagtcccataatttccatacatagcgccaccaacagggaccacgtgttaacaatgagccaatgagaacgtttctcattcaaaccactgcgcatgctctcccttttataaaagaccaccggccttctgtgtcttcagtaacactgaccagagtacattcctctcgggtagctggtatttaaaatgacttctgcacagagctggacgcattgactgtccactttacttttctatttaacacttgagacggggcagggcggacatattactggtcactagtctacttcctccctcggtgctacacagtcgggagaaagggaagagcctttagaatcaagaggataatgagaacaataagatcccagaggagatattccgtatgaatattcttgagagagatcttgtggtaatcaatgctccctctcttccccattatctcctagactcagactacagcttcccatccttatgcaatactgaagggcctagacatgtacagtggccacattcaggtgtccccagaccctacaggaacttaagaatttgatgaaaaaaaaaagtctctttgtcaggaacagcagtaaaagaattaactcaagacatgagataagactgtctagactataaacctcctcagggcaggaacatgcccagaatgttccaaacatactgatactttatgtggacttggctgatgacggttggcttgagacctgtgtgactgaaataggccatgctagcttagtttaggtcgtggaatgccacgacttcttttgactacttttgtagagtgttcctcttttggaaataaaaatatctcccagggcctgctaggccctgccagatagctcggcaggaagaagtataggtgtgttgccccatccctggatcatacatggtggccggagggaactgactcccaagaggtgccctctgacctttccatgtacacacacacacacacacatacacacgtacatatgcatgaaagattttaaaaaaaaatctacccaggtctcttaggtagagttaatttgttaatttcccctggcctagatcatcacagcttactttaatgaattagggagctgacttcttttcctcttgctagccctcctgacaggcaggagccatctttttccactttcatatcctctctagtctttgcagagcacttatgcatgggcagtacttattgaatgatttatttaacttaatataatcaaattgaacatttgactaggaccacttctgcagagaagtggggaggtggggagggtctacttccataggcagattttacatggtttttcttgtctcccggcttccagccctgcattccactttcctcaggtggctgtagcataatcctaggatttgcttttgtggagtgagcccagagcccaggtgtgtcagcatagcagttggcattaagaagcaaatgcaaggctttggtcattctaatacatgattttactttacttttaattgtgtgtgtgtaagtgagtgtgtgtgtgtttgtgtgtgtgagtgtgtatgtgagtgtgtgtgagttagagtgtgtgtgagtgtgtgtgtgagttaaagtgtgtgtgtgtgagtgtgtgtatgactgagtgtgtgtgagtgtgtgtatgactgagtgtgtgtgagtgtgtgtgtgtgtgtgtgtgtgtgtgtgtgtgtgtgtgtgtgtgtgagtgtgtgtaagtgcaggtgactctggaggacagaagcatgggatcctctgtagctggagctataggtgtttgtgaacctccctgacatgggtgctgagacctgattggatggtctggaagagcaatatgtgctgttagtcactgagccatccctctagcccctgatgcacgatcttctgattatgacactctttcactttgtcattggggaaaatgtgtcacaaaatggaaaagggcaaaaagctatatgacctcatccctactcagagacagacactgggaacgttgtagtgggtttattttccttactttccccgttcccctccctccccctcctccctcctccttttccctctcatatcaagtgctaatgtacctagaaaagatactaagaaagaaaggacaggacctttgtgaacaaagctctaacctctaaggagcgacatctcagagcacttgaataaatggactgcagcattgtattcctgaagaggaggaacgcctgcagtccacacagggctctttcaacattaatcttcatatctaatgtaattctagtaaaagtcataggagttgtattttgtttaagtgaaatattaattcttttcaacttgccagtgtttgtttttgtgaggagaaagtggccaaaggagctctcgtctccctaagggagagaatgaaggcgggctttgcttcccgctcccaagacatgataggattgcagtgattatgacgacactctctgggtagaaaattatcaggtcaatggatagaagagtgagcacagctatcaccctctgtgtgggggaggccactggagcccagcggagaggagggcttgccagcccgcagctaccaggggcttggagagcagtttggaaaaccagcgttgagtccgatcctacccttgggtcctgtaccaaagaaaactccaagtggaggtaattgagatttttttaaggaaagaaaaaaaatagaaaactcttaaaaattaaaactattttcaacttagacaaagaaagctttttttttaaagtactctaactccatctgatattaacaatcctcacgtgtgcatgtgggtaagaaaagcccatgtttgtatgggctctggcactgggtctgctctgagcttctatgtgatttctggacagattatttcgattccttatttctattccttattcttttgtgacttgggggctggaaccaggccatgtctaggatggcttctggccctgacctcgtagttctgacacggactgcccgcttcctgctgttcttccctcctcatttggaaacaccagcccatgacatggaaaacagaaaagcaggcacagtggcactgttttctgttctgattgcagaaagcatttgtatatgtgttcctgtgtttacatacgtgtaggcgtatttcaggtgtacatgtatgtgggtccgcgtgtgtggtgaccaaagggtgcatgtgggggaggcgctcctctgaggtggaagcacacacagagaaggtactggatttaactggaatgggaaaagagttgtagactttattacatatttttcctctttagtagggctgaattttatatgaagttggattagataaattcagaatatcatgatgtcaaatactaattaatagaagtacttggtttatacacaaagtttgaaataatttagaccactcaaaatttaaaagtgaaacaaaatctcacttctccctcctgactctggtgcagcctaagcaaattttcaatgggtttcactcagcagccccagggagtaagtggaacacatgccagggggcagggcagggtcatctcaggtcacacatgccagtgggcaggacaggggccatcacaggtcacacatgccagtggccaggacaggggccatcacaggtcacacatgccagtggccaggacagggtcatctcaggtcacacatgccagcgggtaggacagggggtcatctcaggtcacacatgccagtgggcagggcagggtcatctcaggtcacacatgccagtgggcagggcagggtcatctcaggtcacacatgacaggggggaaggacaggggaaatcacaggtcacatatgccagggggcaggacagggggaaggacaggggaaatcacaggtcacatatgccagggggcaggacagggtcatctcaggtcacacatgccagggtgcagggcaggatcatctcagatcacacatgccagggtgcaggacagtgtcatctcaggtcacacatgccagtgggcaggacagtgtcatctcaggtcacacatgctagtcgtcaggacaggggtcatcacaggccacacatgccagggggcaggacaggggtcatctcaggtcacacatgccagcgggtaggacaggggtcatctcagatcacacatgccatggggcaggacaggggtcatcacaggtcacacatgccagggggcaggacagggtcatctcaggtcacacatgccagggggcaggacagagtcatcacaggtcacacatgggtacaggaaagcgggagaaggcagctcactgcagcaatcagggcacctgggcaatctgcccagctgtgcacaggggagggagggtgcagttcctatgtgggttatgactggtgcattgtctctgtgtttgtatcttattcatagctaacaagaaaaaaggaaaggaggaaggagggagaactccaggccacaaaagacagtctaaaatataactcaagaacataagaattttttcataattccttcatgtaataaatagcacagcttgataacataaattaggtaaaatgggagctcaaacagaagatgataaaatggaagaataaaacaaagagagactgcagtcacatagaaacaaattgaataccaaagtattttatggaactaataaataaactataaatagaaggaggacagacactactgaacactgaaatactgacatggaagaaagcctgtaagcacagcataagcacaggaaagagacaaagagatcaatcaggtgctaactgataagcgcattgctctgctgcaaaccgcactgctgcaatattgaaaagagggataatacctttaaagatttatttctcattcacaaacagtttatcatggagaacccaagtctggtctactccatgtggccgccatgatgccactcctcctgtcccctcttctcctgtctaccccaaccccctgtttcactgcataccggacagtctgtctaatggtggaagctgatacctccccacatgtcagctcatgggaagtgtgaagagacccaagggaaagccttctgaggaggtgacttagagggactcttcccatctaattcgaataaatgtggtcacatgcccaatttagtcgcagggaatactgaaatgtccactataattttaatttcttcaaaaccaattttaaatgattgttcttaaatgctttaacctcccttgtagtccaccacccaccagaggtagtggaaaagaaaggctatgggggcagggggatggacttgtttagaaagtgatctgtgattgtatagccatgaactcaggctaaattgaaatgtcatgtttgaaaagaaagcagcccctggaggacaaataagtaccgtaatatgaaaggcaaagatgggcagcatggaagaacatttggtatctcccagatggagcatccagcaaatggaagagaagatattcacggatgtaagaaaaagctttcaaagtaaagagggagcaatgtgctgctgagaagaaggcagaaccccaggaaagactggacttagaatatttaacataaattattttaaatgcctacactttaaagatgaagaatgtttcaataagtaggaagtaagaaatcacctatgaagagtaataattcatgttggcattagagttcacactatttaccatcaagaagaatggtgtggtgtccacatagttttgaaatcagagataataaacccagatataattcaggtgtaaaggcaggtaagatacccatgaaccttgcagaacagaaccattgatagctcaaggtagcctaccaaccaaaacaagaagctgtagtataaagggccatgagagtgactgttgatgaccatctgattcatctgcatggatatcaaacactggggtctatagagtcaaaatcgagtgtgaacgttgtaagtgcaaacagtgtcagagtttctgaaattgagagaggagagaaaacagctgagtacagcaagaactcggatgccccatcttctgaagctaggctgttctactcctgttctcatctaacccatgccagaaaagcttagtcgttttcataattagctttatccagctgtataacatgagtcagcaaagaattgcctgggcgttagccacctgctcctgtgagtaaagctgcatcagagcatggtgtcatggtccattcagtcactaacaaaatgccacaaagctggtggctcctaacagcaggaacagatttcttatagttgtagtgagtgggaagttcagagttaaggttcttagattcagctactggtaaagacctgctttctgacttgggaggctactttctcattgtgtctcacctggtgagaaggaaaggccattgggaccatttctataaaggcccctgaagtgtctgtcctcgtgacctagtcatgtctcagagacattcggccctcagcagccagcttcccagtgttgtttctgtgttggcagtcagcctgcatagagctcacatgcctgaaatgttcactgtaattttaatttcttcaaaactaatttttttgttgttgttgttttttcgagacagggtttctctgtagccctggctgtcctggagctcactttgtagatcagtgtatcagttgttataaagataccaaggaatacaggtctcctaatgaaaattggcatgctttcttccactttatctccatgtttccacattggcagaacctgtatatgaggtatcacatctggaccagagtgatggagcagggtgagctttctgtttgaaggttctaagtcataggactatggttgctgctgctcccttcagctttcctttccttccagtgctagggtctgatccgagggcttcacatagagctcacatgcctgaaatgttcactgtaattttaatttcttcaaaactaatttttttgttgttgttgttttttcgagacagggtttctctgtagccctggctgtcctggagctcactttgtagaccaggctggcctcgaactcagaaatctgcctgcctctgcctcccgagtgctgggattaaaggcatgtgccaccacgcccggctcaaaaccaatttttaatgatggttcttaaatgctttaacctcccttgtagtccaccacccaccagaggtagtggaaaagaaaggatatgggggcagggaggatggacttgtttagaaaggttctttggagcaactcccatctgtgtagtctggaaatcagcagttcagtacacaggttagcatcagcagcttgatccactggaaaacacttcacagatacaccagcagttcagttcagcagagtcaggatagcaaacaaaccagcagcggtggcacaacctagcagaaacagccaggtctcagccttggcacaagtcagcaggagggacccggaggaactcaggaaaagttcctggctgtgcctctctcagctaagcaaagatagcgaagactcgagacctacagtgttgcacagccagctctataagcaagccaagctcagctctgtcactgtccattgagtcctttttatactcccaccaaacatcacatgtgctccatgggtctttctgtctcagctgacatcactctgccaaactgagtcttcagaagtggcaagaaactgcagcacaccaccagaaggtttttggtccatttctctctatggagttccaacaaatgcagctcaactacacaacataaggcagaccaatacacgtgtgtccttagcaaagaatccttcatcaagtgtcctttcccatgcttgccttagcagaacatcctttctcccatgtctacttcagctaaacgttccatcatgaatctgccttagccttttacctgtgtccacttcagctaaacactcttcacatgtttgctccagcaaaacaccatccaacacaactggcttcccaaagaactcttaagtttccacttcagcccactattctcctttaagaaaaaacaattgcccgtctaaaggaatcctggaatatttgttaagctttactaatttgttgatgctgggatggatttcagatggaagagtacttgcctagcatgaacaaaccccagtcccaagtaacacataagctgggcatggtgccatgtgcctgtatttccagctagaggatcagaagttgaaggtcaaccttaactacatagtaagttcaagactaacatgggctacatgagactctccctcaaaataataaaaataataatagtaataataataacatagtttgatgtttttaattcagaccatttccctctattaaattcacatcaaatttaataatgtaatatacatatctttattatacatcagtgtatcagttgttataaagataccaaggaatacaggtctcctaatgaaagttggcatgctttcttccactttatctccatgtttccacattggcagaacctgtatatgaggtatcacatctggaccagagtgatggagcagggtgagctttctgtttgaaggttctaagtcataggactatggttgctgctgctcccttcagctttcctttccttccagtgctagggtctgatccgagggcttcacacacatgactcaagctctctgctactgagctggagccctgggacctcccttttttaaatttcaagcaattctaagctaatttagacgatttagacaaagtaataaagtgctgaattatagttttagaaataatagtgaaaaactatatgtaaagggcattgttctgtttgtatgattattgaataattatatttcatattatgtcagtgtgtgaaggtttacatatttcacaaactgcaaagcatgggctcttgtatgctgtaatcacatcatagagggagtcccgaggcagtgggaggagaggttgctagggatcagcttgttctcaaagccggctttggagctggtgtctctctcagcccatctttcctgtcccacgccacccctcccccaacaggtccacacttgtgcaaccacccagaccacccctcccccaacaggtccacacttgtgcaaccacccagaccacccctcccccaacaggtccacacttgtgcaaccacccagaccgctccaggttgcagggcctccgtgcttcgatgtgctgcttcagttggccaccattcttctcacctgtaactgcatcctctaactcacactgtaactccatgcctcctttaagatgatgtttaactatcatccacactactacatcataaccctgactgcacatcacagtagcccaggaagccttacagaaataccaacacctaggcctgaactaaactgttccgatttagttgcccaagatgggtgcccaggcagcagtgttttctagagactccctgagtagttccaggacacagtcaggatacagttgctgcaacagccccgcaacagcagcagctggcagagttaaaaccgctcccatttctaaaatccccttcgctctcagcttccccattgctcatgaaatttaatgatcactgtattaaagttagtgttacatagtaagtgctcagtaaatgctgaggtatgctgcattctccttccaaccaggctcatacaaaaatgtttatccttgccatcagaaagaacggacagcagagtgggcagatatttgttatttagccagccacgatgaggaatttattttctgtactctgtaccctctcctgtatcccatccacttgcccaccgttgcctctccagcacacatacctgttgttggcacggtgtcggggactcaggaaagcagcccacgaatctgccgattgcaggacaggctgctccctgcccctcagcctctcctttgtgtcattcttaatgatgtattttatactggatcttgctgctttagctttcaaaagccagttgtcaggtgttctttatcaaaggctttcagaaaatccagataaattatgctctgtgccctgaaactgccaaacctgtatttcacttctatccagagcttgacagttttgttgaagtggaatctctctctctctcccttccatttaccttcacttccctgaccttgatacctgccagacaaataagagaccctgtcccttttgatactggatgtccccagtcacatatatgccagctctagttaaaaaaacagtgggcggttatctctgtctctcagataaggagtggattccagcagtaacttggatgtagggcggggagagaagagagctaaaggaaaggaagagcagccgttacctcagcaaacctggggttctgtatgactctccacattcccctctgcaatggaggcaaggctagtcacacctgctcttctctggaactcgcctggaaggcgataggaggcactttcttcctactgttccctcttaaaatgctatttgagggcaggggaggtggcacagtagataaagtacttgcattcccaggtgttagcacgggacttaggatcctagaaccgatataagagccaggcagctccagaggcaccctgtaatcccaggaagggagaaacgggattgcctgggcaagctggctagcaagccaaacctgtgagctctaggctcagcaagagaccctgcctcagtgaataaaggagagagcaacccaggaagatgccgatatcagccccagacctgcacatgtagacacatacctttttttcttagttattatttgaggcagtgaggtgcagctctgtggccgtgctttcttaacgtgtacaggacaccacgttctatccacagcaccaaaaaggaacaagtcttgttcctgtccgttgagcaccatgaagagttgagggtgtagggggttctgctttcctgttgcccctcaggactgcatcctggctggggaaccctaacactttgatcagctaatatttaaaccataaggtgagtttctacctctgtgcttagaggaaacatccccttttctctccttaagcctagtgggcaaggtgtaatacagcggaagtcaatagcaaggtcctcggttacaaaaccagattcattgtagatggacaaactacatattcagcatatgtgtatctcgaagcaaatctactaactgtctactaactgtcagctctcagtgcttcctaggttaagtagtaaaccattacctcgttcccctggaagctatgcaaactaattaattttcagaaaataacttgaaatgttaagtcagtttataaacaccagacaatgaaattttccctgctgagaggtccagtaatctacaacttcctatgatcaaggtagaaacagtgtacttgaattaaattaaatgtgacttatatgcaaagcatacaatgtttaaaatctacaacccactaaaaagaatcaattcctatttcatcactacaataagagcatctctgactctaggaatggtggttatctgtgtgactgatggagagacatcacacctttatccttttcgaagatttcaacagtccgtttggtgttcacacttaacctgttactactgactgaagtgccttccagttagtgtctataaccccaagactcttatttatttctcgggaaatctgcctgtgcacaactttgctgtattcaaaacctcccatgtcaagatttagtacttttatattatagtcattaaaattgaacaaaatcttaatagtcctttattaactactacactgaatttgcatagtagaaatcaccacatgttaattggatttaattaactattttaaattacacaaaattctgacagtagacagtagcatagggtactcaggagcaataaaattagagatggtattgctactttattaaaacttaatgaaactattcataatcttatttattgttcaccagaagaaaactgtgttcattgtgaaggcaaaaatgtcagctaacaacatttttttttatcacccaggataaggttcagcggttaataaaagggtccacgatctccaacctcacagttctgccaccctctcatcgcactgacccccattttatccccatacctgtcttgcagaaggatgccagtaaaggttggtgatggggcagccatgcttaggggtgtgagggtgggagccttgaggaggaatgggggcctgagttgaaatagcttagccactaagtttctcaggtgacctcagataagtcaggtccttacctgggctgaacttcaccctggactaggtgaccaccagagcctcttctacttctcagtccattatgtcatgaatttaatatcaacttaggtgttcaggttatgtattaaaatggttatcatgtttacgtgatataattaggagttactgttttctaagtactttctgatgggcttctgattgctttttaatgttatttcagaatactgctatgcaaaaccatgaagccagagataatataattagtgtttttttcatttttattacttattttatatgtatgagtgttttacctggatatgtgtatgcctgtagtccaaatgcatgcctggagccctgtgagtccagaagagggtgctgggaatcctggaactggagtacaggtggctgtgagcacgatgtggtgctgggaactgaacctgaatcctctgagacagctctccagcccctgtaaagcccaatgttatcaactattggacttctaatttaaaaaaagatggtatcatctttacgtaggtatccatggtgcccaggacggtctgggtaactgtgaattgactgcataagtaagcgaaagagtaagtaaagggactcggattaggtgtctgtgtctgctgtgatcctcttggtttcccctcgttcatttgattggctgaaatgttaaagaatgctaagtgaatccccttcctaacgcaaatataaaggagtgaggtggtctgatctcaccccttgtctgtttggagtactcaggacccagagttggtgccaaaccattcttgtgatgccagagattcaaagtcctctggtgtctagctcttgtctgctgacctgtgtctgctctggtgggtccccctgcatgtaatggctctgaatttattaagcttcccacacttgtcgttatttctttcctagctgtgagaagttctgtggctcacactatctggtggcttatggaccactaatgtcccagggacactaactaagtgacactaggaagtttgcctttcttgcttcagcaccatcttcctcctacatgaaattaggagtgaatgaatgaattagtctttactttagcagatgaaaaatctctgtaagacaaaggtgaatctaggatcaaggcaactagtgcagagggaaagacacttatttctatatccactagagaaccggtggcctatcatatttataattaatctatcaattagttctcatgtatttatggagtacttgtcttaagtcctgttactgtacaaggaaatattagtgtcaggaaagcacaggtcacagaaatgtgtggattttcggggtttgatgcctttaagtgatatttcaggcctactctaggcctgcacaagctcagcatgagagatgaacagcatccacatcaacaggattccccagggttccttgaattatctggcaacatctcagaaatgaagctccccagagagtcagtggttgagaacacaagcacacagaccagaatctagttttcttacctgaagagtgcacgtagctcttacacatgggattgggtatggacagtaaaagatatttatgaaaacaaagcctttactactgtaacctacagagctcgttcagttccagtgaagcctgactgatctcagagggcttaagctgtgaccggagcacagacaagtcttgtgggagcttcaagacttcagatcctcaggctctgctcgtgtccatttgggcaggtctgggacagggattggaaaccttcacctacaaaaagaaaagcaatgctcccacaaatgattgtgctgtatgcaaatgaggcttctctcggaacaattcttttgcaggtgaagactttggctttcagccccttacttagcagagactcttctgctgtggcaacagactaacgtgtctgatagcgcttcgctgtcctcgggcagcaatgcactgtcctcaggttcccggagcaaaggcgaagtctcaggccctcttaggagtgccaggctcttcaacttagtccagcttggttttagattatgtactagggatttattgaaatagaaaattcttcacttttctctctattgtataagagcattaagaaccttaagccccagcagaaatttgttgcaggtggtctccagatttctgggtttctgacatgaaaacagtagacaacagaccgactgtaagaaaaggtctgtccctaacatggggctttgtgtaattattcacctgtttatcccactaacaaggtgtcttacccttaagtttcagtggcagccttgctgatgacaagaaattgtacatcagtttcatgagttactaacgtgttgctctaatatagtcagatccagtcaggcttttaaaacttctggtgatatgagcatgtctacagataatttttttaacaaaatatgagtgatttgaacactgggtatatgggttcaagtacacaggctttctttccttcagaacaaaagatcaccttagttattaagaatgtgtgcctcatatccatgagttacaaaaactgcaataaaatcaccagtgattgaaaacgtcataagtgtaaggaagttttagtttgtcttgaaattatatttctacctaaaaatgaaattaccttagtgcaatttgatttcatattactgcaattggaaatgatttttcccttgggttagcatattaagcttaaagtgtgctatagctatttttcatgcagaagattaaggcactagaacgtacctttacaaatgagatgataaatgatgttacatttctgttgtgcaattcatagggctcagactttgtacaattgcttagagctaaactcatgttttgttgtgtgttgaccttccttttaggcgtcttaagtatgattgagcgagggctgatccccccaacagcgaggattacctttcagaacccacccattaaaccccaagcacttcctctgcacagttttgatgagcatcgtaaggtacccatggaaggtaagacactcacacctctgtgcttagctgggatcttgcaggaatggcctctccttcgaaacctagactgctagacctttcatcctcactaacagaacaagaagataggttaaagcatctcgagtttatttgagcacacaaagtaactgaggctatccatgcagagcctgtgcactgtgtgtaagaaagttggtattttcaagggcttgtagtttggctgaggaaacaagacaaaaatagtaaagaactgtgagactatgccggggcctagcaaacacagaagtggatgctcacagtcagctattgaatggatcacaaggccccccaatggaggagctagagaaagtacccagggagctaaagggatctgcaaccctataggtggaacaacaatatgaactaaccagtacccccggagctcatgtctctagctgcatatgtatcagaagatggcctagtcggccatcactggaaagagaggcccattggtcgtgcaaactttatatgccccagtacaggggaacaccagggccaaaaagggggagtgggtgggtaggggagagggggcgaagggtatgggggacttttgagatagcattggaaatgtaaatgaggaaaatacctaataaaaaatttttaaaaaagaactaaaaattaaaatcaaagcactaaaactgaaagatgctctattatttgctatttgagtgtccttttatgatgtgattgaaggcactagcttctcaattagacttgtcttcctgcttttagtgagggtattacttgtacatttgcaatacaaatcgtttatcagctatatgtggtgaaaatagttcttcctactctagctggacattttatttttttatagtgcctttttaaaattaaactttttatattgagataattgtaggttcacatgtgtttgtaagaattgacagaattctttgcatagttttcccccagtattaacaaagtagaatattatagtatgatatcatcatcaggttgtattgaggataagacagggccttgttcatggtaggcaagcactctcccactgaggtatatgctagtccccagccaggatactggtccactcaagactggaatatttctatcaccacatggatagaacccaccaacttccttccatacgcctttagtccctggcatccagaaatctgttcttcattgtataactttgtaacttcaaaaccctcacatgaacaacctagtagaggatggaacctttggggtttgtatttttccgagaatcctccagcttgtagctcctcttttaagttacagtctgacatttccatgcacacatacaatatgctttggtcatatacacttctgttattattcttttgtcccccatgccctgcccttcccccttccttttccataccaatagttaactccctttgatcattcatatcttctccctatcctagcttctcctacatatgtgaaaaataggaaatccttgtctttataggaaataagctgattccattaatcttctagcaaatggtgtaattttattcttctttatgtcttagtaggacccatttgtgtgtgtgtgtttaaatctattatctcttagtaggcagctaagctgattcaaggagaaataggcgtatctctagtaaactgatcccgagttctttgtttaaacatgaagaagtgatatggctgaatcatatagaacttctgtttaattattcttgaggaattccacactaatttccatagtgtctggtctaatttatatctccacagttgtgaataggggctcctttttcctccctggatcctgactcactgtgagtcactgtgtgtcttttcctctgtgtacgggccacgggtccttgattggaaaccctctcctcagttcaattcccgaccgtttcacccgagcatttcctcctttgttgtcaacctttggagttctttatacgctctcaacatgaacctcctattggatgagcagccagcagagatgatcttttcctattccaaaaggtgtctcttcactcatggattgtttattctgcagtgagaaagctttgtagtttcatgtaatcccattcatcatttattattattatttcttgaaatattagctatcaagaaagcccttgccatgcctacatcttgaagtgtttgcctggtttccttaggcaggttcaaagtctcaggcacattaaggtctttgatccattttggtttagtttttgaacagtgggaaaggtggggatttagtttcagtctcctatatgtggacatccagtgttccctccaccatttggtaaacagaccatcttttctccagtacttgattttggtatttttcttaagaatcaaatgattgtaactgcttaggcttatttctagttcttctattatgtcttttaaaattatatgtatgtgtgcatggtgtgcatatgtttgtgtttgtgggggacacgtgtgtatgcaggtgcacatgtttatatgcaaaggtcactttatttgctgaggtggggtctctcagtgaacacagagctagatagttcctgcgagtctagctgactcccttgctcaggagagcccctgcctctgtatcttgaatcctgggattctggtggccgctgtgcctccctgacttgtctgaggtctaaggatccctgccctcctgcttgctgagcgagtgtttgtttgttttcccacagagctgtgttcccagcttctgggtctgcttttcgatggcgcaatgcggctttagttactatgcttctggagtctagtttgaagttaagcattatgataattctacagttgggagttttgcttagattttttttggttctttggtgcttctatatgcattttaggtgtgcatgtacctacttctgtgaagaatgttataggaattggtttttgctttcttttatcttctactattttatttttaacttttttattgattgtgaatttaacatcatgcaccccaattgcacttagctccctgtttcttcatctctgacgtctgccctaacaacctccccccaaaagaaaataaaaataaaagacaaacaaaaaacaaagcaaacaacaaaaacatcttgctgtggaagttacattatgccacataatataccctttagtccacacacctttccttggaaatgttcattactgcgagcgagccattggtctggttcgaggcctctggcttctgctacaatactggatcctcactgggactcctctcagacaccgtgttgttgccctgggtcacggagctcctgcagctttggatctgcaggactggactgttcacacgctccagcaattcatagatggggtggatgttggggtgaaccgactcaaagccctgcatctaggcttgggtgatagctgagctggtcagctcaccagctgtctagcatgcaccaccagggcaaactctccagcactgcccagtgaggtgcagggcctgctttcccaagtacacagctggtgaggggcagggccagctctgcacagctctcaaacatcagcatggttccaggagacagcccagattaggaatgtccaaatggcctttggtggtaatgtgggccatagacatcaacacaggtcctcctatgtctgcatggctacagacccagacatggccctcagcagaagcagctgggacttcaccatggcctcaggtggcagcacaggctactcacagcagactgttcctctccatcttcacgtctccagttccacctctcttcatagtgctcaagccagtctactactcctctcccaactcttacacatgcttgcacatcgtagtggctcccactgggcctctgtgttactggaactttggtagagattgcactgaatccataaatcacttttggtaatatggccattttaacaatgttaactctgctgggtttggtttggtttggttttgactagtatacatggaattggttttctgacttgttttttcaatgatctgttgttgggatatcgaaaagctactgggttatgtatgttgatttagtagcttgctacttgttgaaagtttttatcagaacaagaattgtctggtaaactcttttaagtatatggtcatatctgaaattagttgactttcttcatttcctaatagcatctcttttctctctttctcctccctttctgctctggctaagaatgcaaacactatatagaataagaaaggaagagttggctcctgtatcttctctgacttagagttttctcctattccttgtagcattaggctatatgtagcctcatatagatagcctatatgtagcctcctatagatggtctatatatagcctccaatatgttgaggtatgaccacttttcctagtttcttcagagcttctagcatgaaaagatggtgaactttgtcgaaagccttttctgtatgtattgataattactggatttttatcggattctgtctatatgctgtgttacatctatcatctatatgcatatgctgagccttgtttgcatccctgggatgagtctgtcttgatcatgatatgggttctttttaatgtgttgttggattcagttgaaacttatagcagtaattacccatttgctgccgagtaatgcttcctggtagcatgctgcagccatttagcatgctgcagccatttagcatgctgcagccatgcacccgtcaacgctttcctctgctaggagtcagccttgtaaacattaacgtgcaggttttcaatgaacatgtgtctcatctctttagagcgaatgtgattgctgggtcttagaggactttcatgtctgcttcatccattcacagttactttcataccaggaagtggttttggttccaccatcaaaaataatttttagatgcaaaaagaaaaggaatgtctcttacttgtgctgatatgtgttctcagtgtccattgttctcctatctttcatgtgtttcttgagcattccctcctgtgcagttagttcttttagattctggatttgagtgatagagtgttttcattttctttcatctggggatgggttaagttcccatcttttttcctaaacaaattttctttaaaacttctttttaaaaaatgattatctttatttttatgtgcattagtggtttgtgtgtgtgtgtgtgtgtgtgtgtgtgtgtgtgtgtgtgtgtgtgatgcctgttcccctagaactgaagttacagacagttgtgagctgccaagtgggtgctagaaattgggtcctttggaagagcagccagtgctcccaaccgctgggccatcctcccagcccttaaaggaagttgttcttgaacatatatgattctgattgccatgtttttttcatcttagcacttgaaggaaaggagccatgccccatcttttgtcagcctctgactgtgaacttgttcccctgtaggtaaggtgggcctttcctccacctgctttcagtactttactctctgtttttagttttccgagttttttattgtattgtatgctgccttggaattccgtggctttttcccatttcctcttgcctcagcctcttagacccgtggcttttatcttactggatttggcatgctttcagccgttatttcttctctgcagtatccttctgtgtcgtctcttccttggggaagcaatggcatagatgtaggctctctcacgtcgtcccacagatctttgaactcctttcacttctgtccactctgccttgggtctgccttgggttctcaggttgggtgctctctgtcatagcttccaaatcactgactcctttctctattatctttgaacttaggttattgaatttttaatttttttcattttcttttcatacattctaattctttgtagagattttgtatgttttttatttgttttaagtgtgtttgtagttgcttgcggtgcatttttatgatggctgcttcatgatttatgattattataatgttcatgtatgagttttgatcatatgtgatgctggtctaaactcctccctcatatttttttctcgaatttttatttaacagatttataaaatgtcacatgttaatgggcaatgttatgttttgatacatatatgcattgcatactatttaaaccacgttgaatacatttgtcttcccaaacatttcttatttctctatgataggaacttttaaattcccttttttgtagcccttccacatatctggaacattattatccactgtcactatagtgtttgaaataatatcacagcagaacttactgttcttaatcaactgtgctggccagtttcccatcaacttgtcacaggctaaaattatttgggaaagggggctctcaattgaaaaatatcttcataagatttgcctgtggggcattattttgattagtggttgatgtgggaaggtccagaccgttgtcagtagtatatcctaagcaggtggacctatatcaaacatcaggctgagcaagccatggggcacaagccttggggagcaagctgtggggagcaagccagtgagcagcactcctccatggcctcggcatcagctcctaactcaagttcctgctctgacttccctggataatggaccacaagcttccactgaaataaaccctttctccccgagttgcttttgatctagagtgttctagcactgcagtagaaatctaagagactgtgattcaccagcactctcttcccatctccccccttgctcgcccgcttttgttacccaccactctgttcccagcctctttgaaattaacctagctagatttcacacatgttatgatcatcacatcatatggtaattctgtttttaattttggtgaaacttctattttccataattttatgttcccattaatagaacttaacattggtgacaccattttatctcttgtaaccaatgagttgctttcaaggctacagtgggtttcagttcctttaatggacatatcccatgcagaaaaatagaaacccatgattaaagtcttcggaatttgcagttttgcaccaggctgcattagacaacgtgctccttccatgcccttatttggaaatgttctgcccacagccaagcagggcctgaccagctaacctcaagcctgctgtttctttccctagaatgctctgtaagccagtgtagcccagcagatgtaagagcagtctgctcgcactgggttagcactgggttggtgtctccgccttattttctgtcattcacagacagtgtgtgagggtgtgctccttttatccacctctttgccagacattctggttttagtcttttgggcaatagctattcattctggggtgagaggacagactatcaggggcttcttctaagtgacccctcctttcatagtcatgtttaccttttcttgactgtaaggctcctctagtcaacttgggccttgcatacacattgcaggtaggaaaatggtggtggtgggcacgttctctcttaaatctatcaggtggcatgacagccacaaggaagacagggaacgtgaacatccagggataggatcaatgttcctatttagacatgcttagactgaatatttggggttggtggacaccatggtgcactggtcagcgtaatggtgagctgtcacagagagacttgctagaagctgggagaatcagagaatgtgttagactgggccagatgcaatcccttgtgtgccaggttgtgacgctctgaaactcttgctgcctttaagaagatgcttgaaaagagtcctgatagcccagctccaggctgagaaagcgagtcctccaaggaagctctcagctatctatcacatatcatgtattaagtgttgttcagtgtcagtcaggttttcaaagactgttgttataaggtttttttttctcccctagaatgcagggcttgggctctctgcaaagggtagctgagtttgctgcccatcagcaggacagatatgattgagtgttattgcctataggttaattatctcagaaataatctttatagcattattcatcatatcagttttcccaagtcagtttaagttttagtcatctttttaaatagctacccaataaaataattcatcatatgcaactatattaattatcttgtacataaacctggaaatttggctaattaaattaagggagtctttttttttttttttaaagaaacaaattttcctctctactcttcctgccttttagatctagctttcctctaggcatttgcataaggcgggctgaccttattttctaaagaagtagttgccttatcatagattttgctttggagacaagaatcccagcggtgtcacagaatgggtacaggaaatgcaggtagtaagcatacagtggatgccagccatctgactttcaagttgaaccccataggatgcaccagatggcctagcctgtctttctggaaggagtaatgttgtcctgcctctgtccacagcctcctttcctctcgctctcaagccacgcccagttcctgaagaagtggaggagccttctcaccagatagaaatacccaaggtacacatatgtctaccacagaggagggcaagctgccccgtgtgcaggctgcctatgtgattctgtgtaacagacacactgtagagttgttccttccacacaggagtaagcagtatttcagtggctgttagggagcagtttatcttattatggttatcattagtctctgtggtgctgtggatcaaatgcagggcctcccacatgctaggcaagagctcaccactgaactacacagtcagctcctactttaaaagggaaaatgaatgcagaagtcaactctgccaggacactataggcagggctgaaggtgagcagagccactgcagtattttgagagtggcaggcaagtgatcagcctatgctagcagctgctcagggaccagaagtctggggtgcagtaacttgttttccatccacatctacatctgtagcatatgcagtgtggtactgagaggcgtttcccatatatcatttgtcttcaagcataagaaaagacaagctctataggtattcacagaaaaccacnnnnnnnnnnnnnnnnnnnnnnnnnnnnnnnnnnnnnnnnnnnnnnnnnnnnnnnnaagaggaaaggagactgtattctctaacattaggtccctcacatggccgtgtaattcactctccctgaagatgcccccagtttaaaggggctgggcttttctgtaggttgttttctcattttaaggaccactgacagatttaggataattaaaacttttctccatcaaaaggggacatctggcagtactttttctggtatgacttgtgtagtcatgtttttagctgttctcatgaaaaaaagaaagaagggattagaagggaccgcagggagatgaaccccactctctcagagtaggctgctccccgccctccctgcctctgatgcccagacatcctcatgaggagccaggtgccttttccacactggtgcgccgtttccccttaagagattgccaggctgcttatggtgtagcatgtcatgtgacaacccagttgccatggcaaatatttgtgttttcatgaaaaacatgagttaaaaaaaaaatcaatgcaaatggctgaatcccaaggcagacaggcctccggcggtgcctggccggcaccaccattgtttcaacttcagctgtttaacaggctgtgagcaggccaggggctaatgtgcataatgtcactaggcccaggcacctgtttagattctcactccaactgagaactcagctctgttttatacagaacaaatctacagggaatacacatatcagagtgagtttttagccagtaagcagtttgcctcataaaaaaatcaaacaataatgtcttttctaaatgcttattagccctggcattattttcttctgttgacttgcaaagatttcccctaacgttaaaagtagtaatatttaaaggctgtggcttcaagttggtacatttccaaactgactccttaatagtggtatggtaaactgggcacggatgttaaaggtgaagagaaaagtgcagagtgccgagctccacattggagctattgcagaccctctgccaggctcccaccccaggcaagacgccacagtcagccctttcttacgatgcctcttgcagtgttccctggaagtggaacccagcatccgtttataactatgtatgtaaatctttcctttctcaaaccctttcctcaaaggcaagtggggcttggcgtgcacagcattgatgtctgggggtgggaaagccctctaatcattagctcccgccagtgtgggtagggaacagcgggcccagtgggggaagggaagaaaggcaaagggtgaccaggactctgagccttctatttgttttgtaaaacttcccaggagagtcattttgatttaaactgtgtctccttctcccttgtaggggagagccaaaaggtcaagaggaccgctcagaagaaaggtctgtaatttgtgtgactagttggaatttgggatctgtcacctgatgtccctttcttttgcttcagggcagaagtgtgggaggccgcttgacagctggagttggcaacaaaagttcttttgcgcttcccttctttataaaagaaattagaccatggttaaaaaaaaataattgtggttgcggaaagtgaaaaacatttctttgctctctatgaggactgaatcatgtcactgcccaaacaaaagatgtctcatcctcaaaatgggtctgaattgtgtgtttttagcatcaaagattttcatttaagagtatatttacaaggaagcaagatgttaaaaatgaatgtagtagtttattggcatgtgctgacatgtgtacacacattcatttgtacttacacaaacgtgtgtgagtgtgtatgtacatgtactacatttgtaaagtaggctggggaaatagaatttaaactgttcacaacaacaacaaccaaaaaaaaaaaaaaagtgaaccggtccccacatatggcaagtacactcctgtaaggtctgtcccatcagggccctgcgctagcaggaaaactgcacttggaatgtgctgggctctctgacatccaggagtgccccctttcaaggagggagctagctgtcttctgcctgttcccagtgctggtgcaggaaggctggatctgcaacagtgactgcaagacagacagtccttctgacccagacacactgctcccagaccttgcctcagtaccaggagttctcactgtgtagaaaccatcgtactctgtaccttgaaaagagaccgtgcgtgaagaaccccagagctttatttatctggcatttggaaaccattcctgtggtgtcagcatatcctgtgtatgtgacacaatgcacctcccatgcccgaggaaccctggggttgatggaagaatatctgtgctatcactgtccctggccagccagaggtaaaggccagtataaggcttgtcttccaggttagctctttcctaggggccagtcttgcagatactactcttagtgtaagtgcagtgctaacctgcactggtgcctgccctgcactggcctctggtgctgaccttctgagggctgcctcccctgtgttcccatgtccagccggtaggtgctgttannnnnnnnnnnnnnnnnnnnnnnnnnnnnnnnnnnnnnnnnnnnnnnnnnnnnnnnnnnnnnnnnnnnnnnnnnnnnnnnnnnnnnnnnnnnnnnnnnnnnnnnnnnnnnnnnnnnnnnnnnnnnnnnnnnnnnnnnnnnnnnnnnnnnnnnnnnnnnnnnnnnnnnnnnnnnnnnnnnnnnnnnnnnnnnnnnnnnnnnnnnnnnnnnnnnnnnnnnnnnnnnnnnnnnnnnnnnnnnnnnnnnnnnnnnnnnnnnnnnnnnnnnnnnnnnnnnnnnnnnnnnnnnnnnnnnnnnnnnnnnnnnnnnnnnnnnnnnnnnnnnnnnnnnnnnnnnnnnnnnnnnnnnnnnnnnnnnnnnnnnnnnnnnnnnnnnnnnnnnnnnnnnnnnnnnnnnnnnnnnnnnnnnnnnnnnnnnnnnnnnnnnnnnnnnnnnnnnnnnnnnnnnnnnnnnnnnnnnnnnnnnnnnnnnnnnnnnnnnnnnnnnnnnnnnnnnnnnnnnnnnnnnnnnnnnnnnnnnnnnnnnnnnnnnnnnnnnnnnnnnnnnnnnnnnnnnnnnnnnnnnnnnnnnnnnnnttcccatttcctttatatatataaaatattttgtattaaatataattattttatattaaatataatatattttatatttattttatattttaaacttaaaatattttaaattaatattttaatttaaaatttaaacattttatataattatttagaatatataaatatatatgtaaaaggaaatgagaacagatcaaagcagtgacaggttcaatgctgcccaagttattatatatataatataatatatatatatatatatatttgactatatatatgtatatatagtcaaaagccacttaatgtttgtctcttcccctctgcctctctgtctgtttatatctctacctctttgtctgtctctctatccttctgtctctctgtctttctatctctgcctctctgtttccttgtctctcttcactcttctccctgactccccatatttctgtctctttgtcttcctgtctgtctgtccatccatccctctatgtttctctctgtctctcttatctctgtctccttgtctccccctgtctgtctttctgtctctctgcctctctgtctatctctctgcttctgtctcttaacagtttattgattaaggggtgggggaaacctccaaacaggaaactgcagaatcttttacaatctgttttaattttccataataaattgttcctcccacctaagcattttggcattaagctttcaagtaaacttaattctacacttttacttgaaaagcacctttttcatggaaaaaataattgacaaaacaaggcgctgcacagattccttttataatcttgttcatattgctggatatttattgcatgtaaatgatcctatttatacacatcagagaagaaattaactatcagcaatctacaaagtaatatttattttttcctttgtctatttcactgaacaaactttaatgattactcacgaaaaattaaagtccagaaaggagaaaaatgcaaagtcagggagaatctgatgacatcatagccccttggcactgtttaagccttggcatgttcctgtcttcctatgatatcatactgtgtctttaactttgattttatgttaatactttatcacaatcttatacaaacattgtttaaaactcactacataatattctgtaattaaagagatcctataatattaatagccattatcatgttattcaacattaaattataaatcttacctgatcacaggacagctttgtgctataaacccagtccaagtggctctgaagtttaaaacttaaatgttggcatgcagtgagtcctcactgactttttccttgtgcatcacacagtgcaaacgcatcagtgaatgagacagacagaactcttactctcctgagccgtctctgtgactgaggaaagcagatgatagacctcttctgtaataccctagaatggtccacgcctagggaaaataaagcagaatggtcccagttattgaaaatgtgcccgagtagagcgagcactgtaagactcctgtaagcgttctttagtgatctgtggtaacagacctctctgcatacaccttctcctgaggaggagtggaaagccaagctgcacttggatagcagtggtgatcctttaaagcccagctttctcctgtctctgctgggagaccagggggtgaagctgccttggatctgcgctttgtcgggcttcctgtgcatctccgcagcaggctcagctcatccgtcataattgacccaagtggtccttaactgtgccacagtttctcagggtatttgaagggtatcaaaagagatgaaatcaatgctgtagtgaagtaaagtgtgcctctggaaaaggaatttcacatttgaccgaaaacagaccccatctatttaaaatgcctccctggccctgttctgttgggcttttcatatggatttgatgggctgggtgttttgttccatgagagctcacctaagcatggggacttctcttcagaatgggtttcagagttgaggaagacctatttgaatacagcacctttgaaaagatttgctggaatcattcgagaaacccgctgctgacccaaggcctttgccctcagttcctctgtattctgtgtctctgctcacacacacagtcctcgctgcctttagtccctttgcactgtctgacccagggagctcccgggcctcaccggctgagggactgtcttgcccactcacgtacctcagaattcttaatcttggattctcccaatcctgcacagcagatggtatgggtaatttgtcatctatttctggtagaacgttgctacaaataattttctgtattaaatggaaaagaaaaacctcccaggtatttttcatggtcagaaaatgatagcagaggtggtttcattgatcttgaggttttactagctccgggagtttgtttaaaaaggtaatattaggttgaagatgtggcttgggaggcacagtgcatgtctggcatgtgcagctctctggatctgtccctggtactgcatacaaacaagcatggtgacaaatgctggggcaatctcagccctgcaaaggtgccaacagcagggccaggagttcaaggttaccttcagctacataccaagttaagtttgaggccactgcccaaatgaaaacataagaaaaaatttaaaagcctgcacatctaggaatccttccctttagttctgtatgttttggggatatttaggaatgtggtcatgtcactgtactgggggctccacgaagcggagttaagatcttacactttctctgggtgtcagtttcccatccttatgacaagcactgtggcaaggggaggcactgggaaagctctttgtgaacttaccctttttgcatatggtaaaactgaggtccacagtgggtagtgtcttgcctgcagtacgaatcagacagcagcggagtttggatctgaacccaggatagaggatatcagggccaaatcttgttttgctgggcccatgacagtctaaggagcaaatggcaaagtagtgcctttcaagatcccttgtgttctaacactcagacccgtgcttctgctaagttcccaaaccccaggtaagttcgcagctctcctctgagtgttgtgtctttggaacagttcttgcccaccgagggtctcatctgtgttttatacagacactgacccattgagaaccttccctacaaatcaaaaacaaggtcaaggtcagggaaataacatcttggtctttggtgaataataaagacttctctttgagggaaattcttaacatccctcaatgcaaactctcacttaggactatcatatgcaggaaggtctttctcagtggtacaggacaattacctaccatccctaatagatgcattttggtggttgagaaaccaaacattggcttctgcaatagagagcgttgttagtctctccttccagctattggagtgattgccattctgtagagatacctccatagcagattccccaggtatcccactactcattaccaggagacagagcttggaaatagtacgacattaatttgatattatgtccatctgctgtccatacatatgaaaatgaattcttttcaattataaattcatcttagcctggtatggtggcacatgcttataattttaataaatgtgtatgtatatggatgttttgtttgaatgtatgtctggtacatgcagagggcagaagagggcgttggatatgctgggcctggagttagagataattgtgagccactctgtgggagtgaagaattgaaacttttcaaactttttcaaattttagattcctttagactctgaagccatttctccagtcttacatgcttgtaatcttaggaatcaagaggttgaggcagaagggttaagtttgagggcagcctaggttgtatagtgagatcctgtctcaaaacaacagcaacaacaaatggaaaagaaactagtctagagttggcaatgagcccagggatagagtgcttacctagcatacacaaagtccagggtctgatccctgatacagaataataacaataataataacaacaacaacaataataataatctagaaataagttctttctcctgaatgtgttctctgcgtctttgcagacgatattcctaagtttgatagtccattggcagggctgggtttctccagttgcctcacattgggtctttctaacccaccttgtcaccatcctgccttcctctcctttgctttagagttagaatttcccctaaataactgctctagaaactctgaaagttacctaattagtgatcacactctgcaaataaaaaagagcatttcccagctagttgactcagtcagttaagagcaggatgctaataattaggccacagctgaaggtctgagctgggggtggggatggggttagcctgaagggtaggcatttcataaagggacatatgtggctgtggtcccaagaagggggcgggagggtgtgcagacctctctgtacagccactccaggacgggaaacaactgctacttagtaacattgcaccaggagcagctccttgtgaacagaagaggaagatgaaatggaagggtggccatgaaggtaggacaggaggaggcagccccggaggcaggcccggtgtggcttttcctcaggcctctctttgcagcaggccgtgaagccgccgtcttcacctgctcacggcggctggctcacagtgctgatgcacggctttaatttgggaagcctttctcttgagaggcatgtctcttcttgctctaagtctgaagtgctcccgtgtgtggcattctctgtgacagatgtactacagctatgctttagctgactccagacccacagcttcctggcacctgagtggtctatttgatgtccaggagcacgcttcctttgagagcaggtatctcatccgagaaggtaaaaaggtgcaatccttttgttcttaagcaacccctgttaaagtctacaacttcggttcacccaaggtgattctctcagaaggtctaatcctcctttgttgatgcacatagataacctagatagacccagcctgtggagaggcatattgtctgagagagatggaggctttcccttctgagcccttggcccagactcttctgtttcatagatatcactcttctccataaaaagaaggagttgtgaaaatatctgaacttctttaaggagacagaattctctggcagatcatccatccatagcttttgcttcctgcagtagtctgagtcttcgtgactagcaagaccagccagctccacacatggccatctgtagccattctgcagccattttgcatatccgtttctcatggatggggccctgccattctcctctgaatgctaaccttgcgtcatcagaacccatctttgtaggaaggtagacgtgtggctgcaggcccactctttgacaacatgtaccatctgccttctccccagccccattgaccactctgcccagcactgaggtctgctagcgggaacattccttgttaaactctctcctgcccatttgagaaggagaaatttacttagacctgaaaaacagtctacattctcttgctgtcttgtttagatcagaaagagagatgactttggctagaagactttatgccttgtagcagttgttcagttagaagtttgcaaaggctcaatgctgtgtggagctggtgtgtagagctagagggactttcccacttcggatggagtccttaggattttgacctgacagtctatttttctccttagaatgtgggaaaggaatctgaggttgttttatttctctgtctgtggttggttactgtgtctttagtataaatatatatcttgtcttacattttctcttagactctcagacttagaggataagactttatgcctggtccttgatgactctctgttaacaattatttgagacaacgtatgaaccagcctaacctagcagtgctgtgtcacaagagttattgatacactcaccatttcccctctgagttttgtgaaaggttttaaaatttcagagaacaacatagccctgtgtttcatacaaatgggcatatggatgttccataggtatgtggaagacagttgatgttttaaatcccggagtaagcagaaccagtcatcccagcaggttagtgcctctcctcactgcggagagctcagggcagaaacctccgcgctttccctttccctagctcctctcctgggccattgggcacttttagatcctggtatgaactctctttctaatgcaacaagtgcctgaaactgaaatacagcaagtttttattggcaaaatgtccttcttagtgctaaggcttgggtctcaggcctcgtggttgttagacaggctgatcagcagtcccttttttcatgttttatttagagacagggtctctaagtggtgtatgctgggattaaagccactctgtagcccaggccagtctcagactcatcacccctgttcctcggcttcagaagctgggaggacaggcctatgccaccagacccaggtttgggtttctttacttaaagtgaggatgatgttatatttttctattgtcatctaagtctcttctgatttgatttagcttataaatcatgatgttttaaatatagaaagactcttttaaaagatatcacccaccaccctacccctagagaatccctatggacatttacacataaaataatgtatttctctgtttttatggttgatgatgagttaagaacaaggaatcagcaacacagttctttaagaccatgggtacatagatagaagatagaattataagtatatatatatatatatatatatatatatatatgtgtgtgtgtgtgtgtgtgtgtgtgtgtgtgtgtgtgtgtatatgttgtatttgagtcaaggtctctcactaaattgtgtatgctaggtttgaagtcactctgtagtttacatagattatcattttatatatataataaagatatgtatgataagcatgatatatttatatctttattattaaatatataatttataaaatggctcaaggaatcagatcattatatagtataaacagattatatatcatcatatattacatattatatatatttattatatatagagagaagtacttttagagcagtttaatagcttctcatgagatatcccccagtaatgagttttagtgacatttctttgacatccttatgtacgtatgtagaatcagtcctagcagccatgccttcccatcactgggtggtaattgatgaagtgttagtaggtatgtactgatcacactcttacagagatcatggaatattttaattctggaaaactttctttcctcagggcatgaagattaggacaccgtctaagactaggaaatcaccatgggattatatattttctgtttacaacggctgtgtagacaggacagccccagacttcttagcattcaaatcacgcttcaaattaatctgggggagtattttttctttcctggaacaaattgagaaatttctcaaggactatgcaatatctgaagccaaaataaaagggaagagtctggtgtccctgcttccagagtttgagctgaagaacaaattaaccagaaatgatgttctggctgtgttagagaacccagttcacattcagatgctgttaaaccttccgggacagaggtacaagggccaagatggaaaggcagaagctgccaccaagatccaagccacgtggaaaagttacaaggcaagatcttctttcatttcttatcgccagaagaaatgggcctcaggtgtgatcgccctggcgtggcttttacattgccacaggacaagactaaagaggatagtgaaggaatcccgacagagacacctggagaacttccgcattcgagcccaggtatgccaggctgccagctgttaaggcaagcctctttttctaaatatttcctgcttgaacaagtgcagtaacttgtctctttatctttccttccctctccagcctccctccccctcagcattctgcatctataattctcctcaggatatgatacacaaactcagagcctggcctgcatgcctgcaaaatctgttataatttttctataaaagaaaatggtccttgttttgactatggtagttgtgttgggaagtcactgttctaactgcattaccttttctatacacacacacaacacacaagcgagcacgagcaaacacacacacacacacacacacacacacacacacaccttctgacactttaatttggtaggaaaaaacatcctcacttgtctatgttgctgtcaccactttgtcagaaagtatttaagtttgcagacagccttttaattagtgctcacaatttcatttatgtttgctttctctttttttcattcatattctgttaattaagtgagctgcctctaatcttcccctgccagtagcatcatgtagccacctaattaaattaattggggaagatgttttaagtatgtaattaaatcaattaatataatttatgcctggcttaactgtacagtggaaaaacagctgaagtttgactagatgcatccactacagcgccctgtcactgatcaatgctcttcttgcttttcagcatctggcagccaactggagtcgcatcaggacctccaggaggactattatccatataccatcattaggtataacacttttgcctgcaaatctatcagcaacctctattacccaccacattatggctccttgattgagttcaaggaaggccccttgttttattcaaattggtctcggcaggaaaatgttctcgacatgatgagagtaataacacggggccctcgctcgaaacggcgtttaatttggggattaagcaaataaagtcattatgtgggggctgctattcagtggagaggtgatttgctgtaattcgctttcatctgtatgaaatgaactaaaaagttgtatttttccccctgaaataacagataatgttttcgatcttctttaatgatagaagaacacgggcttgtgtgtgttgttgctgttacgccaataagccaggatattgcttgtacactgtttttaatcaaatgtgcagtcaaaatgataagctacattctctgaaattatttagttctaattgcgagcagatgggatgttttatttgcacctagggcgcctgagcaaaaggaaatgctgtgtgaacaagaataattaagaagttgaatagtgttttttgcgcttaaataatctgcagtttcatgttaattagcactaatgtaattatttaattacatttatgaattggggaacttaaaagctgttgtctgaaacacagcggtaaaacaggtatgccaaaatgacataggtaaattcagaaatctggactggaagtttgtctcagacacgagttgctgtcggcgtttgcactgctggccgcctgctacttcggtttgcttctgccgaggctgttaaatttcttgaatgaggctggattttttttttttatgctgacttagtagagtattgacaaatagcaaaccccactggatttcaatattacctgttagtgctttgttgaggccttttaaatagagcagtacagtcagtgatctattgtagtaaaatcctaggctacatcttgttctcaagtgtgcaaatgcctgtctgcgtgctcgttcgtgtgtggtagagaaacatcatatctaaatggttatatgaaagacagatatcgtagttactatgaaactgaaactaagattttttttaattagtaaaattttaatagtaagaaagtaaacacagctacctagattatagagtgtatgcttttacccgaggacttggcctgagtggggaaatgctggccctgtgcagagcttcgggttttgctcttctgtgcttagaattgagtgaagacagatctgaattccatcctaacttatgttttggttttggtgagattacttctgcacacaaaatctgctcatacacagaaattgtacttgtaatagattacaacccgagaggctgatcaaagaccctattaactgacatggggccttagaagaaggtgcaagagctttggcttctgcaactaattgtgcacgtggcttttattgtgtggggctctcgttttgctttctctatttcagagccctcgtgacagtggtgataagcatgaagtccctgtcccctactttgcaatgtggatggcacgaggttatttcagtcacccttgcacaagcttctccctccacttttgaccctcccccaaacaactcctaaaccatgcactgtacagaggtgcctgagacagtggagtctctaaagaagcaagaacctgtatcaggagtgtaagcagggcagtgccagaagcttctacataagtaagtgtcacaccagttcaagggggctgggtgaatattagctagggggaagagtgacctcatcataaacactgaattgcaaagcataattttaaatttatgattaaagctattttatttcatattgttcatatgtagtataaataaatacatatatcagtatgagaccttcatcattgagggttttttgtttgcacacaagagaaacaacaatttccaaggaaaattgctaattgagtatttttaagagccaagatcaagctcaggttgattcccagtgaagcctgcacagaggcctgcctcacccactcctcctcctcttcagaggcctgcaccagcctccctgaaatggctctgggaccttaaaatcagttaataaccttatgtcatctcccctattgtacaggcagaatcttaaaatgtatctatatctatatctctcttctttttaataatgtggggtaccctttttcttgtttgcaactttcctgtgtgaatgcacaaagatttcagacagatacacatgacttctttgtctcatgggccagacactcattgcagcagtttataaaaattaaagtgaaattatttcttctaagtacattgaaaaaaaaacaaatcaaaacaaaaataatcaccccatcctattcaatataatttcacttccagatgcaggtaaattcagttcaacatcccaaactaattgtcaggctcaggcaagctctcccagtgactcacagatggtcctgtttctctcacatggaccattcgtgtactagaggtaatttacaccacgccaccagccatttggggatgtcctcacttatttgaccttaagatgaaatagtgaaaaggtttataacctactgctgctgaagacactgggctctttgctatggttttgcacctatggagatagatgcattctccaagtactgaaaagatggcctgctggtaacatttttactgcaaaatagtataatgtatttttaaatctaaagtttgaaaataagattatgatattacatattgcagagcagccaccttgaaaagaggagttatacatttgattgactgcatttcagatagtgttccttgaagtgacaaatatttgtagctatttttaacctccaggaaggtggaacgcaattgactaattgtccacagaaactgattggccttgtaatttcctaagataaaaatggaggctgatctcttaattggatattgcatattttcatcatttttattaatgaaatataattataacaaaataatctgctatggttcacagcaaaaatagaaaactagggtctattttaagaataatctatcagtcaaagaagaaagaactgcaacaaagaatcccaatttttctagaaaaaaaaaagggggtctaaataaaacctgccaactaattctgcctgcagtttcttcagtcaggttattttctttgcttttaatttatcccttgcacctctttgctgcagtacacctatcagtgctatttctaaattcagtggcatttaaaaatatatattggcatgaagtgggctgttgccaagtactgagctctgaggtttcagctgaaatctggggccactggaagccagtcacttctgagcagtgcctctagccactctccctctagaaagcaaatagaagacacactgaagtggctttgctttgtattttcctctgtgtaatattttatttcattgccaattggccaactgatttaacggctaaaacaaatgtatatagttttattttttccctctggacattagttcagcaaactatcattggttttaacacaattaggatgtccaaaagactccatcccataaaaactgtgactgctgtttctgtaaagttcatggacagcattcttcagctagcccacactactgcaaaagcctgaaggacgagataggaaaatgttggtgtacagatgaccataggatcccccacaggctgatgggaaggttacttcttgactgcagttgctttacttccaaacccaggagccaaaaccagagtcccccgtgaggaagacaggtggactactactaccaaggacacagactgcaggtcagtctgccctgtgcccctcggcacactggcacctctccactccagtttttagttaccaactcaaagattggatagattttgtttcttagagtttgagacaggaagttggaactttccactcagtcttgactggcttcaacatatgttttgacaagtactatggtgtacataggtaagctatggagatgccacattggagccttaagtcagaaagatatacagtcaagatctccatgatgctcttttctagagatagtcatcttttaagatgagacagagaccatgtcagaatttagtttcttcatagcacaaactaaaattaaaacatatttgtattcttccacgttgtgttcaagtaaataacccagggcagcgcttacccacaggtttgattggagttggccaaatgattccatcgtatgaagataacccccaacactgaaccatgatacatagaaatggcactgaagtggatgccaagtgcccaggctaacagaattttcattagattgattaatattaggataggctttaaagtgaacttaatatactacataaagatctaatctttgaaatctccttcacagttgtccttatatactgatgtttgttcactcaaactttacactcaaaatgatacttggagtccctaaggaattctgtctgtcattattttgctgtatttattgtaataacggcactgaggatgctgaggcaggaggattgagaatctaaagttagattaggcttcacagcaagattctgtctctgtctgggagagggagagacagaggaaaaggagaaagggatgaaggaagaaaggaaactaacaccaaagaaccaagaaatgaactaataaatgcattactagtattgatctatattaataataactatttcccaaaaatgcacatttagtttgataagtttgcaaatcccttaatagaatatggctggattttggtgtttctgtattcagattcgatatttggaaaggggaagaatgttttatagcctttcaaataactgtgtgcattcctctttgactttgtaccaagcttggctgagatgatgttacatgttggctttaacataagcctgtgcgccaataaactcttagcagctcagaacttatggcgaatgagttgcctttaaaagggcaggtaacttctcagaatcattttgaaaacagttttgaacttgtagagcccctgccaaatggtctcagggcccttagatcccctagaccataatctgagactccctggctttagctgggacaacagaaagtatcattcttttgacagcgaatctgtttattacgagaacattttcaaaacttagcaaacatacctactatatactttataccttcctaataaaataatctagtcttcttctactgcctccaaaagacaactattaattttagctaaactggcactgcatatatattatataaatggcttagctgggatctctcataacctcttgatttataattcttgatttcttgaatcttatgctctcacattggtccaagtcactaaaacgtggctgtaatcctactgtctatattatgggtctctggattattacaagtcacatgtgaggtctgtcacatgtaccttcttacttttaaccactggaatgtcaaagcttttttgatcaatgggagcagttccaggttgcctctgggataatgtctctgtcgcccagcttctacccaatatgctttcttgaatagaagaaaaggcatggagttactagtacagctgttataacaacatggtaggatgtgatatgttcagtatcaccagttacagttcaaaatggaaaataaaagggctgggatctactgcatcagtccatccaacctacctggatgactaagcacctagttggcaagagtcaccaagagcttctcttcagctctttgagtaccactgtaaggggtacccctcaaaaagaggagctaagtaacagaaaaccacagggtaatgagctaagtaatgagctagcagttcttgtggtctgctacaacactggaggcctcccaggaaggccctccactttgcttcatatggtcttagctgtattctttatttctatggttgcactgaaagaaaagccagtactagaagaactactctgctggttgcaaggaagcagtctgcatcccacgctaggtgtctgtggaagtgtagcactggagaaggcagggtggggcagggaaaccattgccaggaaccaacactgagcagcacagatttagtaaagactagactagtggagtaacgtgagagacagcttactagtgtccttctttcatgtgaagtggggacgctcatgtgggacaagatggaacattctataaaactggaaacaactgactacaatgggacacacctcttagccttgctctcaggaggcagaggcaggcagatctctgtgagttcaaggatacccaagtctgcacagaaagctctaagctaaccagggctatatagtaagaccttgtttaaaaataacaacaacaaaacaaataaacaaataaaaaacaaaaccaaaatacctgagaatagtttgcaggtgataagaatagccacaagaaaggaaaccaggaagactgaaggcccctttctgccacttctgggcttttctatacagacccagaacattctacaaatccctcttgccattctttcaatttgccataaattctctagattagtaagcacaattgtagagtgaaaggctgtgaatgaagagtgtgcacaagccaaggagctggggatgcgcatgactgagtctgagtaagatcctcgggcacactgtggtcactcatgttcactcgttcagtgagatcctgtcttataacgtggacagcaaaagaggaagacacccaatgccaacctctagcctatgcccaccacacaggcacacatgttgcatgcatacatataccatatacaaagaaagagaaaaggaaggaaggaggaaggagaaaaaggaagaaagaaaaggaaggagttttcagatacaagggcctaccagcgacataaagaggggctgtgttcagatagctctgatagttttgtgcttatagaaataataatgatcccacatttatatgaaggtttgttttgagattttagtttggctcagctgaggttaggaaatgaatattaatgaagggaacacttatttcatagcctgtgctgggcatcctggcccggagggaggatgtctgagaaagatggatagatcttagtggaagcaagggaagatagactgtactacagacttggtgtcttaaaacagtgcaaataggctgggcatggtggcacatggctttaatcccagcacccaggaggaagagccaggtggagctctgtgagttcaaggccagcctgatctacaaatagagttccagacagccagggctcttttacacagagaaatcctatctcaaaaaataaacaaaaacaaaccaacaaagaaaaccagtacaaatagaaactggagagatggttccacagaagtgtttcctgctgctacagaacagttcagttcccagcatacctgctaagcaactcacacccacctgcaactccagctcccagggtcagaaacccgcttcttcagacattcattcattcatccattcattcattcattcattcattctctctctctctccctctctctctctctctctctctcacacacacacacacacacacacacacacacacacgtatgtaatgttttattttttaaatacaagatagtatattgcaattctgtggctcagaagtctacaggggactaaaataaaaattccagtagaactgtggtttttgttggaggcctgatgggaagatagggtttttttttttcaaacttgtagacattattcacggaagaattcgtaaaggttcttggtgctctctcaccatcctcaaggccgacagctccctgtgcctcccttggatgtctcactccttgcctgctactctcctgactgcctcccccactcctaaggattcttgtaaaaggtgtacctagaaaaggcagaagtctttttattttgaggtcaatggttagcaaccatatttccctttttgcaggtagccgagcatatacacaggttctagcattgagatgtcggcctgccacaaaaacagaaaattaagatggaaaattattaaagagctgttttctcttctataattttatgctaccatttgaagaggcttctcttgtatgttatgtatttaaattggtcatatgagtgaaatataaagtagttggaatgtataagaatttatagatgtaggtgactttgggaaaagccctgatccccgacttcctcctctataacaggataaggttgaggctgatggctttttcagtgttcctagtctgacctctgatctaactatacttttgtagttatattcttttctattatcaatttatttatttatcttatatcccgatgaaagcgttccctcctcccaatccctccctctctcctcccctccccgtaacccaccttacttccctttctcttcagaagaggggagggctcccatggatatccacccaccttgacatgtcatgtcagtaagactagatgtatcttctcctattgaggctagacatggcagcccagttcaggggaaagggatccaaaggcagctcctgtcctgctgctgttaaggtcacatgtaaagaccaagctgcataactgttacacatgtgcagagaacctagggccctcctatgtatgctctctggttgaccgttcagtctttgtgagccactaggggcccaggttaattgattctgtaggttttcttgtggtgtccatggcccctctagctccttcaatccttcctccctactcttccacaggagtccctaagatgcccctaatgtttggctgcgagtctctccatctgtttccatcagttgctgggtgaagcctctcagataagaattatgctaggtttctgtctgcaagtacagcagagtatcattaacagtgtcagaggcgggctcctgctcctggcatgggtctcaagctgggccagtcattggttggccattccctcaatttctgctccatctttatccctgcacatcttgtaggcaggacatattttgggtcaaagggtttgtggccgagttgtcccaatccctccattggtagtcttgcctggttacaggagattgctggttcaggttccgtatcccccattgttaggagtcttagctagggtctccctcctttattccttggagtgtagttatattttaaagtatgatttctcagtaacacagacacagtgctcaataccccaaagccacagttgtggttcttgctgatgcttgcctggttgttctcaccatagtatttaatctatgctaccagcattgtaagagctttcacctatcatcaacaaatgtaccttgtggatgtgcactgcataaaaataaacttgactttaaaacaaaacaaaagccaaacgtgattccctagggctgggggaaggctcagtcattaagcacacttgctgctcttccagaggactcaaactcacgtcctagcaaccacatcgggcagcttacaactgcctgcaactccagctccaaggaatccgatgctctctcctggcctctctgggcacttgcacatatatagcatacatacacacatgcatgtacacacactcacatacccactcacacatgtacatgtcaataaaaatctaaaaatgcctgcctacttttgctttattggcggtctatacattgcatgtcatgggatgcccatgttgcttatcacagaatgtgtcctgtcccttggaagtgcacatacctcataacgttaaaataacttatctttcatattatctttcatactatgaaaatttcaaagtgttttcatatctgttatttcacatgattctctataacaattttctgagagtgctaacagaaaatgggtttttgaatagggctaagtagccagttcttatagctttgtgtatgtgtttacatccttgatcagcggtaaagaggtaccagtaatttgttggatggctggcctcaagcacatgaatgaagcacagactttctcctgtgctgcacattgcgactacaaagtgatcaaaggccttttacattttaaattggacatcatctgaatgagaaatctcacgattccttttatctttactttagaaagaagacgtaggcacaaatggtctcaggagtggttttacatcacactctattcctcaagcattttccttatctatttatcgcttcaatatatgttatttgttaatatgtcttctaggacatttacctgaatagaataaatgtagacatacaaaaccctaagagttacaatgtcacagccaggcctaagaacaacattgaaagcctacctacttccgttcacttgcacatgtggagtggctccctaaattattaattacttcagaaattaatagtcattttctaaaaggacccaaaccattccttggtcctctgtctctttaattgttaagttcatgtacataacacagagagactttcagatgaattattaactcatttgcttttctgatgttgtctggtgtttaaacactgacatcaaagcaaagacgcaattatcagagtttatttggtccgaagcccccttgcatgaattgctatagttttccttatgctgaaaagcaatatgtctcatctcctgcatgtgtctgtaaaacccctttctcggcagcagtttcgccacagacttgtgtttgggctcagtaaccacaaggaggcatggaagcatctctcaaaacatgagaagtggttttagtttttaagagaattctaccttgagttcatcgcagcacctctatcctgcttgtgagggtgcgtggctcagggtcagactcacttgtgatgtgagcagaagctgccgctctttcatgaggatctctggacagtggggacatgtgtgttttccctctgttccatctccagtaaaaacaaaggaaccatgagactttcttagtactagcaaagtaaatgccttgacctttcttgccctttgaaggttaaaagttcttctgaccgacagcttcttgaatctgtgannnnnnnnnnnnnnnnnnnntcctcgcagcacctcttcctgcttgtgagggtgcgtggctcagggtcagactcacttgtgatgatgtgagcaggagctgctgctctttcatgaggatttctggacagtggggacatgtgtgttttccctctgttccatctccagtaaaaacaaaggaaccatgagactttcttagtactagcaaagtaaatgccttgaccgacagcttcttgaatctgtgagttccttgaatagatgtttctgacagcaaagggtttaactgagccccgtgtagcatggttctgtgatccagcttcaaagcaccacatgattttaaagccaaagcaattccttcagcccgagcctaatgttcttagatgtcgtgaccactcacattaaatgtcagatattttctccacgaatttgtaattttggttatcaagagctttgttggtattgaaaaaaacaagagcctctattgcagagcttgctacatagcttgtcttccaccctggctgtgtgcaaagtacagactgaaatcttaggagtttattgtttctgtaagatgctgcagagggaatacattttgacctaaaaaaaatgcagactgtgccattctgaaattcccatctgccactcttctacatcagtatgctgtctctgttttgacactttgtttgccttttagggtactcccagtatgtgagaaaacacatttttgatttggacgtagaacagaacatgcagttggggaggctgtgcgacatcataggtacagtaaatagttttacatcaatgactgtcacaaccttaaagcagatattggtaaagtattcattatttcttatttccaccctctacaaggaaagaacttaacactctaattattttctgattattttaagtaacatatttacagtgaaatcaacttgaattttaaaatgttcaaacaatcactcaaatagttttctaaattcttttttgaataacagtttctctccaatagactcaaataatttgtgttattgagttcttgcagtgaatggagtcaaaattctcttatatgtgtcaaaaatgtctattgtgtcttctgggcagagtaaaagtggtgcccaagcgaagagcgttgtctccactgtgagagtgggagggagcaaaggtgactgtgagaaagcctgtgcctgtagaagggattcctagagatgcgagcctgggatagatggagatgtctctgcagagtccagtgctggaggagctctttagtcagctcccagctcagacctgagtccaggagagagaaatacacagatgccaaggcttaaaaaaaaaaaaaagattataagcatatgcaataaatcaagtcagtttgtgaggaactggctcaaaattaaaggttaaataaaaattagatttttagaagtttagaagaacttctttgttaaaatataatcgctttgtcccttatttaagcgataccttaaggaagaattttatattatcaacggcaaacttagctggctccctggaatggcatactttacatgattcatagatatttcaatatcattattattttataaatgccatttggtaacaaaaatacatcagtactagaaatttacagtgtcctaaaataataatagtctaattgctttaatatgttatctaggcaccgatgctgtgtttctgcattacacaacagcaagccctttagtgatgtgagattgatttgttagcgctgagctattccaactaaaagcctggctggctagaaccactgaggtgcagcagagggcagactttgctctgatttatttgaattaattttttcctccgctttttatatacccttctatatatagtacaaaccaccacaaaggagtatttttatagaagttccttattatagaagaaaaaagtattaagctacagtttttgagtaatcccgtagttctgtctgtcccttcaaagatagacagttctgagagattgtgccattttctggtacattatcactctgacacagcagtatgaccacacagtctcttcaagagcagggcagtgcagaggggaccaccgacggtaacagtgctttcttgtgaaataaaaataggaaaaggaaatgaaaaatgatttggggaaaaaccccacttcttttattctgttaattactagtaaagggcagtggtcttcctgcttattcaggagggaagcagagactatctgatcacactgctaaaccttgccactggatgttgtctgtgacatcaggattgtctggtagaggccctttagctagtacctttcaatttctggatgagtaacagaggaactgattttgactgccaaccaaagaaacgttcatcttcataactgatcctttctatagttaatagtgaattgaatttgtagattcctagtgaaatcacacttaccctgtatattacagttagtgatgtatattgctttggcataaatgaacaagagaagtgcaattctcatttggtttcttattatttgaagcctagagatttctttccaagcaaaattcttcttctgttactatagctatttttgctgtttatatcctattattttatgtttttctttaaaaacaaaacacaaaaatcaaagcaataataagaacacacatttgccttttaggcccactagtttggtaaaacacttactttcttctccaaaacacaaggctagcaataaatcacatgatcagtcagcgattggatacaagttatttaattactgtctgtccagctactttatcttgatgtttatacggcaatctggtttcaaaataaaatggtagccccttaaatattcacacatatggagcacctccacagcagcctttcccgggcaggttaagagacgctttgtcttcacagggagaggctcttcctgcgtgccgtctatctcaccaagtgagcaaaacatccaaccatctaaatctctgtgttcttctaaatccccagctacccatgagggcttattgagtaattcctgtgtagtctacattgtcctgtggcttggggaacatgcagaatataaaccttgaatttcaggggcctggtgagggctgatgggaactcagttgggagagtgcttgcctagcatgcataaagccttggctttgacctccagcactgcagaagcctagcctgggagtataacccataatatcagcacttagggagtggaggcaggagggtcaggagttctaacccagattccactgcatagtgagttaaagggcagcctggactacatgaaaccctgtctcagaaggaaaaagtgggggagtttggattaatagactgaaaacttagcagagataacagatgacagcacttcatcatagtaaatcaaggggttgatcaaaaggagcccagctgcagagggcatggcaggaagtcacactgactgtgccattcggtcagcatgtcctgtgtttcctttcttttaataccttaagcctttatacaggcgacttaacgccccactctacaagtgaaggagccagtgcttagagaagttaaataatgtgcccagggacctaggaagtaagctagaatcgaatcagtccatgttctgagtattctgccccactgaacaaatcaggctggcaacacctcctgaccttcacagctcaaggtgacacttttagctgtccctcctctgaatgccccggagtgcctgcgtgacttgtgcacaggaaatggctgctcctaaaggctcggtgtctccatccaccgatccctaggtttcctggaatatcaagctttgttcctattcatagctagatcagttagttattttatgaactaatagctccactggctgctaatttccatttgcatgctctagaatgttctgcagcacagagtgaggaagctcatctcactattccatttgaaccagatagtcaattaagaccttttctaagtgtgaggtaagaagcacactttaaggaagaaagtagttggggcaatgttttctttggaccaggaatcattagatttgctactgaagtatatatattcctaatatattccttctaatatatatattcctgctaatatactcctgtccaggataggatgggtttccgagggaaacactgatgctcatcatgagcccatttattctaccaagtccttccctgaactgaccctgtcaaatccaagcatagggtgccagtgaaatttcatcagctttctaaagttaatgggtctgctttataatttgctgacctgaacgggattcattcccagtgacgttaaagggaatggttaagtcagatccctgggcgttatctgaacctttgcttcatggtccctcaaagtcttgtatcctttgttggtggtagtgtcttctttattagagaaacatagtacagaagggccgctttagattactgagacatgcaaagccaatgtaaatgagcttggtgtggctttggggtgtgctctttgttttaaaccactgtaacatcaattggatgccagagttccaattgagtcacttacctttatattagtaattaactttgtgcctgctatttcttagatgccaacgtcaatgtcatctacatctgttcccatcctatgacggatgagttaaagctgtactacaggaaactcctgagtctacaagcagctgtcaaaacggggtactacggggatcggactgacctgcagaacaggttcagaattatcacccctgaagctgtaaacgtcttcactgtgagtttgtcttctaattactatggcttcagggatgtagtaaaattaaattggaaattttataacttgcaatgctctggtacacatcagtgaaatattattgcaagtttaacagctttgctgattagactactagttggactgtaggaaataaataccacagtttaactttcaaacttagctgagttgcccctgtcctgtttctgtaagtagagcctaattgcagctcctgggaggtacagtcaaatgggtagatttataactcttatcaccccttttcttaatctcggtggacagtgaaaggctcccttatactcttggggtctccttataccctcaccaaatgctggcctatccagccataaagctactcagggacagagtgtggatcagggcctccagtttctgacgttcacataggcattcctcgttagtccatatttttattcctttagggaaagtggccttgatgttccacatcacatggttctgtatgaacaaggctcacattttaatgtactgatttatagtggatggaaagagctgctgagaggtcgctggaaccacgaggcagagtcctagtagatggcagcacagcagatgagctgaatgggacttctcacattctaaccagacctcaactcccccaaccctttctgttatcccattttgaagttggtttcaaaaaaggaagattgcatttgccagcagataacactctccattcatagatgaggcaccccatactcggtgctctaccgattagcagagaaactagtgggagggaggttgaacctgaggaagttgcagcaggggtttcgggaggggatgctgctgtagccttcagctgtgtacatgcttgtgaagcgcctttagcggcccctcttttatccagagcagcatctcacccgaggacacctcagcagtccccacagtgttctgctcagctctgcctcactggcacatcctgctgcggagagggaggagaagcacaaactatcacaacatccttatacacttggggtcttctcagaccctccatcaagtgcaggatctctggtgcttcctgcctatctcatgccctcgatgacacaattgatatggatgttaggaagcaaagaagaaaaacaccaaaaaccatttgtggttaaactgttgctattctcagaggcagaaactcacgttcacacctgctggctgccaatagcgtgtgtgcatatctgaaatggaataggcactgagcagaaagggggatttgtggtgaggatggtaggtaggtaaagtaacacttattggattcttggcatgcatttttcatttgagttttatacaatgtggcagcactgaaatcattgctgttcttttatggctacagaaaccaaaactcattttctagctcagtgtccatagtaggaccagattgtgaaccacagtctgtctcctgtaggtcacggttacacactgggataactgctttatttgtggatgacccagtgaccttgggcaagcctcttttagtgttcctgtcctctgttcttcatatgagacaggggatggactgggtaattccagagtgctccccacgtctctccccgacaaggttgccctggcagtggcctttccacttccaagctagagccaagtagcagcacccttgacagcatgagctccagccatggcagtggcaggtctgcatcctggttggcagagacaggtatgcagatttgaagtgcttaatattgccgcttgaagcttaaattcaaattatttgagtgattaatctctcataggcaatcaactttttaaaacacaaaaattaagctccccctttcaaatcagttctgctcctgtttagctattgctttatttctttttaatgggtctgagagattgtgtcagtgctgattttcattcaaatggatggctttgaggagatttttttaaagcatgccaaaaatctgtttgtgcatctctcaaagttactatataaagctaagatttgtaatggtaagtgtgcttgtaagtgtgcgagagtcatcatgccaattttggagtatttttatgtttcggaaggcattcattgtcacaggtcaaaaataagaaacaagtggtggtaaagaaaactagccataaggaagggaattaggaacagtctagacctttgtcatctaggataatctcccgtctagaactgatgaagcagattttctcttaatggcttcacaagacctcaggtcggtggcatgccctctgccaccacttactcacacctgcgtcttaaagcacacactgaggatactatcatggtgtcatggtgcctgaagacaacagctggcatgcccagacatgacatggagcaggagagcatgcctgtcaactgagatgtgtacatctagaggagacagaaatctaccctagctgggacaagtactcagagcttgaacttggttctttatctgctttgctctcttcacagttcataagcacccaggccttcacttcttgttttgtaggatgggcataccagctgtgctaactggagtcacatcctctactttatgatcagagctgtataacgtcagacaaatcattcatctacatagcaaggactgctatatagaccaaaagagagatgatatgataaacaatttgagctgctattttaagggtttattttatttttaagacagacagacagagagagaggagagagagagagagagagagagagagagaatgagagctcactgagatcagaagatgttgctgcatcctctagagttagagttgttgtgagccacctggtgcgggtgctgggaactaaacttgagtcctctggaagtgcagtaaatgctctcccgagtcatctttgcaagtccagctttgaacttcttattctatcgtcaaattcctgctgtacatcaagtcggcagttctgggtgtgctttatttgtttcatatttccacacagaagtaatttgtgggagagaaaagcaattgggaaggcggggcaggcgatcagtaagcacagctgaaaccaagtgccaatagcagaagaaactggaggttagactgcgggagatcggaggcccagacttcacttcctcacgtggaggagggcccaacagtaaattagctaaatcttctcagaggaactctgggtttttcctcccctgccccctttttgggggatgaagtacaagataaagttctaccatcgcagccacttttaagagttcagttcagtagtgttacatacatccacactgcaaattttacgcacttaaacatttcataataaatatggaagtgctctggctttacttaggagttctctcagagctggaaagacacttgactataaggaaggagctgagtttcaggaaggcagagtgctccatgttcagcttcttaactcaaggccttgaactgaacgagaatccgtggaaacagacaccaagatactgctaaacacgctgtgcccaatacttaattcaaagtcagtgactcttgtttatgtcacacagcacaaatgtcctgtagactcaatgctgactacacaacctgtatactctgcactttacatgccttcataaacaaactgaaacttggttttttgtgttgcttatgtgtttgcatgttttgcctgcgtatgtctttgtgtctcatctgtgcttgctgccaactgaatccagaagagggcgttagatccactgaagccagagtttcaggcagttgtgtgctcctatgtgattgctgggggcctaacccgggtcctctatacgagcagcaagtgctcttaactactgagccatcctccagtcccaaacagtgctatcgaacactgcctaaaatacctcttctcatctggagaccaaggtgtattatgaattacagtgtttttactctatgtcttaaagtttctattgttatgataagcactgcccacaagcaatgtgcagaggaaagggtttattttattgtagaacttagagtctatcatgaagaagatcagtgcaggaagtgaaggcaggaacctgggtgagcttgaaacagatcatagaggacacctgctgactggcttgctttctatgacttgccccagcctgttttttcatacaagtcgggaccacctgcccaatgcagcattacccccagtgaggcagctgtgtgctaccatgtgattgctgggaaactaacccaggtcctctgcaggagcagcagtgtgggcctctcacatccatcttcaatcaagaacatgcctttacccacaggccgatctaatgggggcatttcctcagttgaggtttctcttcccagatgactctagcttgggttaagcaaacaaaaactaacaaacacactgtacatacaaattttcctgcttttataggaatatggtttaattacagaaatcaaagacatttgatactttcctaccatcattccccagcaagtaagtatcaaacttgtgtctctgcactgcattctgttagactgatctttaaaattgctgtcagcgactggaaagacagctcagctgactgctcttccagaagacccgggttaggttccttatccacccggcggctcacaagcacctctgactcccgtctgaggggatcacatgagctcttctgccttccacgggtccctgcagaaacaaacactctgcacataaggcacacacactaataaaaatgtgtttaaaatgctgctgagttgttgagtcatagttttaaaaatctttcatttaattttggcttgggataataatttctgaaatgtccctatgaacatttttggtattttgtatttatgcaaagtagcattttcaacattgatgacaataaaatgaaaatattgataaactctgagaaaatagtgaaaatgttctatgccttgcagcatattccccaagacttaattttttataaaaaatggacaagcatataatctcattagtatatgaatttgcttttatctttaataagtgataaaattatatatatacaccaaataactttcaaaataaaattttgatttattattaatacaagtttgatttgtataactattttataaatgcttggagttgcataaagtttctcctgggaatagggatgacaagcaggaaaaacttgaagcagtcctgctctaaatcacccagcaagttgcagattcattcaagactgatttctagctcatatctcttgtcacacacttggaagttatagatccagaaagcatttatgaacagatgcactggatattcttaaacacagtcattcacatttctgtgtttacataaatttccttaaaattatgcaaggtgctaccttctaaaaccccttgaattcccttaaggatccagtacctttacactgtattatcagcatgacattttaattgttttatttttaagaaggttttctctattaaaaattactattactatcatttttattattttcccaatgttattcatttcatgatcgtatttcatccttggagcaactctagcatccaggtaattttttcactctagttctaatacataaagaaatgggcttatggaatctaggtcatatataaattcatatgtgtatatatatgtgtatgtatatatatgtatacacacacacacacacacatatatatattagaactggattcaaagcccagctgtatttgcttacaaactctcagcacttccttgggtttcatgctatcccttctataatagggaatgaaagcactgtagcacccttacagtagacttagtctaaggttctaatattccatccttgggcaatggcttttccatgtccctcttcaccttatgtaagcctcactgtgctttgaaatgtacttcagcctctgcctactctacctttttcatgatggttgctgtgccattcatcaggtgctcaccgtgccccatgtactagatcaatactcgacagtgcattatctcatccagtcctcacaacatccctaaggctggtactgctatcctcatcttacagacgaggaaatggagacttgtagaaaacaaataacttaactatagattaaaacatgtagaaagagagaggagagagggaagggaggagggagggatagagagacagaggggggagagagggagagacagacagacaggaagagaaggagggaggaaaggagagggacacaaagaggcagagagggnnnnnnnnnnnnnnnnnnnntattaataataaatcaaaattttattttgaaagttatttggtgtatatatataattttatcacttattaaagataaaagcaaattcatatactaatgagattatatgcttgtccattttttataaaaaattaagtcttggggaatatgctgcaaggcatagaacattttcactattttctcagagtttatcaatattttcattttattgtcatcaatgttgaaaatgctactttgcataaatacaaaataccaaaaatgttcatagggacatttcagaaattattatcccaagccaaaattaaatgaaagatttttaaaactatgactcaacaagtcaggcagggagggagggagggaggtcttatatgtgctcaaatgtggtgtatgaggtttggtgagcgctgaccatctagctgtcctctccccctgctagacatgaatagaatttttggattgaatgagtcagccacaggaatttatgagccatgtctacctagtcaaaatagggttttttaaagtttgtattggaaaaaattttgaatattgctgacattttcaaatattttctcttcaggagtgctttcccaagtgttggctagaaccattgataattactgtaaaagcacatgctaactgaaaagggttttgtggtaaaatgtgggaggaggctatcatgttaaatgccttgctcctttggaaaaatttaaagtgctgccagattaggagtctatatagagtctgtatagagaagaatactgggcccttcttcattttttttggtattgattttccagacgctttagtgttaaaccatgccagaagagttgtggagatgaatcactattatccaaaggctgccagcctcttttccttctgacagaaggataattccacgtggatcaaataaatacagatgtgtagtaattagttctattcccagtgagcctatttccaacacactaaagatgtgagcgattatggaacctcaccccaacagcttttatcaatttaaactgctaaacaacaggataggtcataacccagcctgctattaataatgtatttattatgtacaatataacaaattggggtagggcctagaaaaagattccttttaagaggagtggtttgattgtccctcagaagcatcacatgtgcctggccactcacctgatgtacagtcccaaggcaatcaaaagaataaaaaatctcatccgaggagaagaggcctacatcgtgggcgggatcctccacagagacgacttagctgtggccgatatgctgaatgtccccatcctgggctcagagcctgagctggttcacctgtacagtgccaagtctggaagcaagcggatctttgataatgctaatgtgccaatgcctcctggaatatatgacatctatacttaccaacaggtatgtagggtagctttctttactcaagtattttctgtccccttgaccttgtacaacttcaggtaatgtggttccagccctgcccagtgaagactgtgtgaatgctgagtcactctgaagagatcttcactaagcctcatgttgtttgggttctctttgttttctattctgtgaacggagcccagggcctctcccatggtaggtaagcatgacaggaccttatcctcagctctttttaactttctgagacaacctttcattaagttacccaagctggtcttgagcttagggtcttcctgcctcatcttccccagagtctttgattacatgtctgaaccacaaggtctgattttagagaacctttctactggcattatagaaattactaaaagttccataatatttacctttcaggttaagttactgagtgttgttaaattacttactcaccaggactaatttactgtcagtattcagcaacttcatatctatcagttcatcatcacggtcatcacccagcaatttaatagaaacctaagaacacaagaatgtgttttggaaaagaagggggcctgaaagcttttgagtattaggtgagaccgaagagtactgtatgcatccttgactccagagacaaatacttcagctctttaggaatggctttgaaaagagtagggtacttagcccagaaacaggaagtgaaacggcttcaggaataaaaccactggggttttcccttggaccgttctgtggcttttcactcctccatcggcctctagaaacggtccattcggatccagctccagcaggtattctcccaggtaactgccatccgtttacatgataaagagaattaaaagattaactgctggctgttaatattccctaacctctgtttctgaacttctcttgaccgattcattctctgagccaatcataaagtatatccttcccctcttcttgaaaaattaaagaaccataagcatggaggccgctaatacgggtcagaaggggggatctccctctactctcagttgcttaagtcaagatgttctgcacaacacagtcactgaaaccaaaatgaaccctttgggaaaatcacactttagtgagactactttgaagatgctatgaatgcgttaagttgccctgaagtgttggagtcctgctatagagagttcctggccaacacactggcttatagagagatggtctggggttctagctgaggagtgatgacccggcttccactggaaaggggaggtaacaaggccagttgcttaattctgcttcctaatagggttctttggctgatagatttaatgtgagaaaaacagatttttaaatgatacaacggaacacacaaactacactaaacaatctccatgtcttcaaaatgcatgtacaaaatttgtattgagtattagttccatcttcattgacaatagcacaggcaattaaatatatttatttaataaagaaaatatctatgttctgagatattttagaactttagacattaattgtggataaaggtctgggtacatttaatatactacaaactctgtctagtgcctagcatccagaagtagactaaacccttctcatagaccctcaggatgttatctggcataaaatatatattggtggtacagcagtaagccagactgtatctgagttctgtgcttacctggaagccatgcatctaatgtcagcaagaattgaggttctccacggaggccttcccagacagtaatggctctacccaatcaatcggagcctttcagtattgtgaatgtgcagatggtgaggaatcaatcctgacttttaattgatgtacattgtaaatttaaagtgggtgaaagatgtgattattttaatttaggttaataagtattcctgggtcttagttggattttcacagtggtaatttttctgcatctgcttttcacaagcctgaagtgaatcacaactaaaaacattacatttttaaaaacagactcaaacagaaaatgataaatgtttggaaatagcataaagtcatatggtttatgactgaattttctaatctaacagtgagcatttcctgttctgatccataaaataaccatgtaagtccctttctggcatgtgctctgtatgaaatattgacagctttggttaaataatcaaaaatggcaatgctattttaaagcactgttcaattttcacttaaagataacacataattctttccagtggtgtagtctttacaatactattgatcgttttcattactgtaggggatccatccacaggcacccatttataggagtctcagaagcaacaaataataggatttggaggaaacactgattctgatagtatttgaagcctccaagtatacagcatatctaaatacacaatttttaaaggctttgctggaatacctttccttaaactagcaaaataatgttttacccaatattaagaggctaaatagcacttctacttgtataacttgtgatcacaggacacacagattacagcaatatatgattaatagaaatagcacctcagctaactggagaaagaaaagctgcaaccctggtggacacattaggaacctcctttggctgtgttcatagccatacagtatgtagacaagagcactgtcatttaaacatccaaattatcaataaatactacttgataattagggagtttatacaatttattttcacctttattgaataacccatagttttatgagttgtctgaggactccaactgtatctactatgatatatctcctccattttgccatgtcatgtagcatcctcaaaatcctttgccaaatagacacaattcaggataacacactgtgcgtttaaataaaaccattttaactttgcagttttagacctcagcagaaaaatattctctttagttaaaaaaaaaaaagaattaatttggtagacaaaggaatagatgtgctgcacagtttaatgtcaacttgccacaacctgttctcatctgagaggaaggaaatcaattgagaaaacgtctccataagatctggctataggcgtgtctgtagggcattttcttaattagtgattgatgtgtgaaggcctagcccaatgtggatggtgccatccctgggctggtggtcttgggttctataagaaagcaggctgagcaagccatgtgaggtaaaccaataagtagcacttctcctatggcctctacatcagctcctgcctctgggttcctgtcctgatttcttcagtgatggacagtgatgtggaagtgtaagctgaacaaaccctttcctccccaagttgtttggtcatggtacttcatggcagtaatgataatgttaactaagacaatagagaacaagaatattactccaagtcgaggatgtcacagccaagaatagcatgggtagttacatgagacacatgctcagtgttgtttttgccttctgggaggtacagacaacaaagccgttttgtgatccaatgagctatttttcttcaaagctataataaaatgctcttatatagaattaagtagtcttgctatggaaacttttgtctgactcaaatacagcacaaatgtcttattgactggtatacaagttattcctctagctcgtcctctgacctctttctatacttcctccttctccagctgtctgcaggcttagatacacagcccatggacaacaaatgagtgtaaggtctggggtcatagcaatccaaggatagtgttgctctgccactcagtgctttatgatgatgggcaagtcaaattactcagcctcttagtattaagtgcaatcactaatggcaccttcattataggttattatattaagtgggaaactcacatataggatacatgagccaagcgctggttcctactgagtgttcagtaatgttagttattgatcttactattattttgggattaaagcatggatttctatctcttaaaatttcatctatttaaggccagttattcagacagcattgttttatatcaaatgcagggcagctgacattctaggaaggctgtttctgcaagtgtttttttttttatctctgttatctgtcattctctataatacatttgttcatgtcaataatacagtcaacttggccaaatggccaaacaaatgtatgttagtgaggaaaaatgtcttatacattacagtattgttttagattactgtatttaaaatctcaatgaagttttcagaacaatatttttattgtcttgaacatataaaaaaatcgtttgaaaaatcagtaaaacacctaagctattatgaaagaaaggagacaatacctggattcagttatagatgtttaaaagttttcctttttccttcataactcagtattataatagtagttttcaatttctcacaaatgtggttgcattttaaaaatggcttttatcccattggctagtgatttctctatatcatacatcacttaaaactaattgaatttgtactaatgagtcacagggaacctaatgaacagactgtgtaaagacactcgaagcaccacaaggaagttgctagaacagaaacaaaatgtgctttttattgttgctgtaactttgccccccagatgatagaacagttgagccagttggtgactgataacctgggaatccgacgctgggtctttaaaatgaacacggaatttggaggaaatgggacagcattttgtgacattccttcccatctacagtgctacaactgggtgctgaaggaaagaaacagatttggccatgaggactggaagaagaagtgggcacaagtgagtgttcagtggtaacttacaccacagtgctgtggacagttaggtgataatcctttctccctgactcagctgttatctatcattgcagcctttcctgggcttcagtctaaatgaagagcagaaatgggctcattgggttagttaaatgtacagtttgggggctcaaaatggtttttttctcccacatcttcaaaataattatgatagctaagcaataactaaaatgccacattcggggagcactgagagtcttggcctccgccctgagcacaccctgtgcttctatcaactgctggaattaagatagctgtattttattaggagaaattctattattaaatggtgctcactggaagctaatgtataatagcattctgtcaaaagccatgtttttgaagatattccaaagaaatttatgttactaccagttcctgtgagatgctcagagaagaatagaccccagaagaaaattcccagcaaagctgtgctcagtgactctggctctgagtggaggtgtgtaaacctttccatatatgttggtgagatgaatttatacagcccaatctgttccaattttgcttaatagttgtatgtggctgatgtttaacctgatctctaaacactgtcccacactgtatccttatactcagcttctctttattgcatgaccctgttttgggtgacctgctagaaaaaagaagattgaaagacaaactccttaactggttccttcactcccagcaggcatagcggtggactgtgcagtgatttgcatctgctttgcgcatcccactacagaagtctatgaatcaagacacaagtgatagaaaggaagggcacactggtgggagccacattattcctgggcaagtgagatgatgaatacatctcgagaccagtcaggagggagagctccctttgataaatgggtcggtcctcccatgatctattctgggctttcttctccctccaacagtgagtggactaaacgcagtggctgtcatggctagctcttcacatattatttaaaggacaccacagtgaattactcttctagaaaaaaaataaagcaaagaaaatgtatttaattttgaggcccatagaggtttctgttacgttctctttgaacaggattttgtccttttgaagcaaagctgttgagtttaaaccatggaaaagtctagcactttcatttaaagaattgaaacactaccgtgtacagtgttttctggcctcagtgtttcaaaccaataatttttaaagaattatctgacattagactatgatagatgtacaatgtttgactttgagttttaagaatatttacagtcctgacattggctgaactgtgcttagagcctcgctgctgattatttaatttcaattattttaaattgttaccaaatacatttagcactgttgttaatgttattaaatttgaaactcttaaataattaatgatctctttaaatcatttttaaaaacttaacagggaaaaataattattcagaaatcctgctataatgtatgggttgtgcttggctgtgaagtgtgagaagccaaagataaaaattaaaacaaggcatgtgtgcactctctcccctcttgtggggactcaagggcagcttatgccttcaaagggaaaccctgctctgagtggaggtgacctgagggtatttattgagaatttaggtggaatgcacctttgttccaggagaccattgtgatgctgtgcatttagacatcaaagcattactttatgagcacaagcgtgttttaatgtcctattacagtctgtagacctgtttcttttcataatgaagatgttgtgtcaccaagcctagcctggcacatacaaaacatatgctggcaggttattaaaaatttcagcttcttgatgaaagactatcctgcaggctaagagtccagagaaagactccattctgaaagaattattagaaatgagaatatgactgtaagcactgaattatgttaatacttacaaatagcatcatttgcatagcagtttgtgacatgatgctgtgaattctcgtattggtacattgtagacaacagatgaaagcagtgctgtgtgtgggttgggcgctgctgtagagtcttacgcagacactagtcttaaatgtaggcaggacctggtgtaggcaccgacacacaacacaaagatcatctctttttcctattttcctaattttgaactgagctttggctgtttgcagttaagacctgaagcaaagtcacacaaataatcagatgctaaaaagcctagtcacctttgaaagttcagtatggagacataggcatatttcaaaacagaaaggcctcactggaacaaaacacaaattttcatttttccctggtggctggtagcaagccactgtttgtcctcctgttgtctaatgaagccagctccccgcgcttcacccactgggtcccaagaagctcagttgctgggtgtacactgcttgctaaggtttgtgaatccacttgcacaaatgcaagattccctgcttctgagtcaggggatgtgtttcagttagtagggatgaagacttaaaacacacttgtaggagagacgccttcctgacacatgctggcgacacagtctgctttctgtgctcacagtctttcttgtggctgctttctattttgttagagggtaaatcttcagtctctcatattattttgtcttactgttagaatgttagaatttgatattcatttaaatatcacccaaaagggaagatctgaatccagggcttccaaacttagaaaggcagaataaaccatacttagatcattagagaactaggtcagcaaacaagcatagcattacaaaggaggagcagccaccacagtgtgctcagaacagcttcccctctgaagccttgtaagcagtgatgggaaccactctcaggtgactgactgacccaagtgcctcctggagaatgtgatagggctttacaaggtgagctcaaagaggcattgactcatcaccacagaatgtttaggaaagttaaaaggtactgtaacaatatcagagagagatgtctaatcaggtaagtgtaaaatcacttttactattgccttcattctctgaattaattctcaaatgtgtgttgtctctcattgcctcaataattgtgagtaatctaattaaacataagaacttagccattttcccctttacccattttcatcacaattaatggctgcatgttattcccttttattaattctaatatgctaaaacactcacctgtctgaaaacttaagctcttctccagttttgttttgcttttgtttgtttgtttgtttgtttgttttttaattggggaccagagaaatgtctatatagtatatgcccttaaaacaaaaacaaattctgctttttttccccctcgggagaaatccccatgagtagaatgctgtatctagcaacagtgctccggctcttgttgtacgtgctgcattgataagaagatgctagtggcctcccaaaccattagcagaacgcacagctgagcgctgcagaggaaacttccttaagctcctggagaagctcccctctgcggccgctctgtgggcgtgccatgtgctgctgctctggcagatcttctacttcccacagatgtccctgggccacactcactactctggagtgctcccctttcctacaagacagtgaactgggaggcgaggagaggtgtcagtatgcatacctcagctgtagaagggaggagcctgtcaggaatccttagaaagcccagatgcctcaccacatgcatccctgtcaatgtaaatagttgacaacagagaattctatgtattaccttttgcccagttacagagagatacacttatttgaatcagcctataaattatcacatattgaatagcctaccttcacaatcagatatagcactaaaaccaagagaagcaattcaacttattcttcatttacacacacaagccaccagaaatgttctttgtttttgtcttacttgtttctagacataattcaggtttatgtggtaagccttttaaagcagagggtagctggcctcacgagccccacagatctgcctctctcagatcttcctgggaaacagccacaaccaaatcaccatgactctttaagttgccgtttgtttatctggaaatagataacagtacaggtgtacatggagctgtgatgagggttaagtgtatcctgtgacttggccagcaatagtcttagcatgtggacgtttaagatattgttgctttgttgctttttattatgaatattaattaaagttctattatgagaaaatataagcaatagtgagcaaataaatacaaagtagcagttctttggcaattcacaaggttatttaggaggctttgtagccttcaagactactgtagtgtacatcaattactattatacaagatgctatcaaaacctcagcataatgatctaattctctctctgttatgattttcctaattaatacctttaaaagaataacactagatagcatcctggcctcttaccatttgaggatagaaaacaatgtgtttcttagagctttcttcatgttgaataaagaggcttgatatagtagagattattctgaccaaaacattgggtctggatgcttctggttccagttggcatattttctaattagtatagcagcatgtcaccaagatcactggaaagtcttaatcatgtacatatttttccttagctctgagaatgacttagaacgttttcttccagttgagtggttattttcatggtgctgccagggatgtgtttgaggtgcttctctgtgcctgaggatgatgacaggagaaggaaaattgcctccccagttaaatgaaagcctgggcaccccttccgaggacctataataatcagctatacaagctgttggcttgtgtgtcctattgatttaatatgcttctaatcagtacataaagctatgggcctgcagtgttaatttttcatatgcttacaaagtaccctttgattttctgtcacacgttaattacagcattttgccattaaataggaagctttgtgtaaactaattactaggtaatcattgtctactgcaagcgtgctgtttgtaccttttattttattctaaaaatgcacagatctcacagtctggaaacactctaccttccagccattagctctcactaattcatagcattattgtggagagtggaggagttgtaattgttgtggtatcagagctgttaattaccggagtaaacagttgaaatggtgccaaggtctattgtacaaggcagagaaaaggaggtttaaatgttactcccaccatctggggacgggaggagaggcaaatgctagagaacagaggcgaggcgccgccgcttcagctccagggttggcggccatatggatccagaaaaatttgaatcaattgaatttaactgccagtttttcacaataactgcgtggaaggaaggaataaagcagaagataagagaaaggaggattggttagtgttttcacacccgggaaggtcccgctggagttcttctggaaatgtctgtgctgctgaaaaccacagagcaggcttaggcttttggaatggattcaaagaaagctttcactctctgacagtcacagtgccatgtgctactggtcatctgtcctcggtgccccttggtggaccagggatgcccttgagaagtctaggactctctgtaactgagccaggctctagacaaaccctcactgtctagtcctgtgcatggtctgtggaaagaaaacaatcaatttacaacgctgctacatcctcctgactccatgtatctgatgtgtggaaatatcaaaaaaggtccctctcttctcttgattgagaaacagtgctgcatgcccattctttgtgtacagactaaaatacaaggctcccttgataaactcagtttcattcctggaactcagtcttccccattacttgaatgagaatcaatccaaagggaatgtgtgcttccttttgtctccattctgcatttaaagagtgtgtccatcatcgtcctcagtcctcccaaccaggtgtttctctacatgtcccaagtctctacatggataggagaaaacctatttccagtagctttctactagattatggctacttctacttatggttgatttaaacacagcctgattcccactttaaaacactgtataatctttaaaacagtcatatgtacttactggctgtcattcttacaattcagtataatttccttgaaaactgttttccaatggtaagaatatttgtctctccccagccatttgctgcagtaactacttttcagtatcattctccaaacacgaacatcttcttctcttcttaagccaccctggattcctgtatttatttctaatcgttcctttagcagatgttgaagtaatttggggtgtaatgtaagcaactcttttaaagagagaaatcacagatagaccaggaagcgagggcagcgtttgtcaggcttgtgtgatggcagttttgccctgggggagggggagtttttccctccttttgtgtatgtgtaaagttcaattaagaatttctagaagcacttaatctttatctattgaaaccccccagcatgcagtgcgacaggatgagcctagaaaaaaaagaaagaaagaaagacaacagttgtgctccctgtggcgaggggaaagagaagcagcagtcagtgctggagagtggagagggaatgaacttctccggtggctgtggttgcagtgaggcagttgtgctgagcttcggaatggaagtacaacatatgtgcctcagttggacaaaatgcttctcaagttgaatcaattgctaggcctgcatgttggtgcaaggtagaggcctcgctaatgagggatcgactcctcaggaagcagtgagtgggtaatgcgacctaagtatggaattatataccgcgttttcaacattccgtttaatgagagccgccactgcagcgaatcacttgccacacacccgaaatgggccattagctatcaagggaaaattgtctttgccgcttttagcagatggagcaaatattttacaaagcaattttacataccaaaaacatttgtgtgctttggtaaagctggttgttttacattatgttaccttctactgcagcataattttccatctcatcgaagacaaacttggcatttttgatttttaaattctccattaacaattaaacacagagtagtaaagctgtccttaaactttaagtaggtatgggaagtagtttccgacttgttggagacactttcacttttttcttcatcctttcaacatatttttgcaccctaaagagggcctgttcctaattgtctcagtggaaagtaatgagtgcaaacttcgtgaaagtaatcaccatgcatccttacagctaccactgtggactgtgaggacatgctttggcccacccttttgttatgtccatttaaaatgcttaagcttcaagaacctcaacttaaatggcttttcctataaggagaaactggctccagatggtggctcagcaatgtcaccgaggacccacagttttcatctcttttttgaactatgtgtcaggctgcttccctcctaaggctggctgttctctgcattgcaagatggctgccagtagcgtccagaatgcgttcctggtgcaggcactaggaagagcgaacatctcatcaggtaacaactcagaagcgcacaccttccttcccagaggccccgggaggtgtttcccagcaagtgactgggtcccatccccagactgcactagcaaggctactacgctgttcattggaggtaagagtagaattccccctcaatcaatcttccatagcaaagaacagggaagaaccattttgaaaggaagtgagggtacccttaatctgaaagaggggggtacatatgctgtttagccaacaacagttatctattctaccattttcccatatttagcatggcgcctgtaagttgatgtaatgtgaccagagtgttagactcactaatggcagtcacaggcacagatcccgctctactgcggcccactggtcacgactgggtttaagtccaagttctgctacttcctagctgtatgacacgaaataaagatagtatctctagccggcggcttcaagatggtcaatgtaggacaccctggcacaggactataccatggtaaactttcagtaagtgaaagctattattttacctttaaaatgagcacagcagttttacaaaatgaacaaccctgtcggtttaccttcagtgtagagtgctgttcacctctgtgccaccagccagttctaatcccagcactgttcatgctgcaacacacgtctctgtctgaacaaggcagggacatagagagtacacactcagagctcagaagctacatagctcctgcagccttgctgtgcacttggctgttacacgaggcttctgtcctaagtagtccacagatccccttaaactgcagtctaactgacaatcctagtttttcaggtctccattctaccccctctgacttggtgtactgtccaggcctctgttcagagctatcagaaatacctataaagaagaactatctagacaggcctgtgagatttccttacagtctgtcttaatccaaagattaagacatgtttctttggttttcttttaaatatggtcaaataatatctgattaatgaagaagttattttaattaatattctagtagaagttcagtcaagaaactacaaaaatgaaatatgagttttggtaagattgagtactctaatttgtattctccttcccccattttacacacacacacacacacacacacacacacacacatacacacaccactagaaatttgtttgggtgggaaaactctctagagttggaagtatctttcgtcattaagggcagtgttaaagtgagaatgctggtggctcccctaagataccttgcatttccgtcagtcaacatatctgttccttcaaattcacatttccttgacagaaatagagaaagccaagaaataagatacaggcataatagaaaaatagtctcgagtttgtcagtcaggtcaatagaaatcaaatgccttctgaggatgccttagaaatttccaggtcattactattactgagaactcggagatataattctgggtgctgaacagtaaatgagcaagccagtctatgcaatgatgaagatgagctgaagagtaagaaatgccatctagccatgagctccagagggcatccctagaaccagtctcatcctgaaattttaaaaaaataaagcataattttccatcatttatgcttcacaaggaatatatcttccctcccacaccccagagtaactggtcctaaatgacctgcgcgtgtagatgacaggccctgggaaacattgacttggtcacccattaccttgtcattagcccctaattctacactgtgagtttgtaaacatatacttctgttgctggcttataacagaaagacagacatatgacagacacactcatgctgtgcataccctttcttacttgaatatgtgagcaccatcatcgttattacagcctttattttgtataggtgagggaacaagtctcttttcattggcactaaggctgaaggtactaagtattagttgaagactgatgcaaccctttagaaatagatagttaatattaccctctggcccctattattccttagtgagctcatcatgacctccagctccctctaagtgccccagcgtcccccactgaatgccaccctgtccgtgccatcagtcctgtagttctctcttgtttgtttgtttgtttgtttgtttttcaagacagggtttctctgtgtagccctggccgtcctgtagctcactttgtagaccaggctggcctcgaactcagaaatctgcctgcctctgcctcccaagtgctagggttaaaggcattcgccaccatcgcccggctcagtcctgtagttctcatgatgagacatgaggcttcctccaggtctctgtagcaaggtttccttctggaaatctcttttttttgctgtggttttgttcagagtgcaaatgctagacattgtggcagaatggcatggaatgccactttgtaagtggcaggctggcaccatgtccttagaagccttgtcagttcattactgaccctcacataatgttgcaactgacatgacactccacataatgtcacctcctatatctttctgaagtctttagaggcagggaatcctgtggaattggtgcttctaaggaagctggcccttcaggtgattccttggcagtgaggagcaagtctacggagagattcccattttctgttattctgtagcatcagctataacggaccatctccttatgcccactactgtcatgatcattgcacaaacatggagcattcttctcctgggcatgggaagtttgatctcaaagctaatgtccttgtcacttaggtgctaggggatatgcagggtggtgggggagacacctgactacagcaggggaagaaggaaggaagaggaagagggagtgagctagggaggatgacaaaggaagctggagggagtcgagactgtaggagtagaggccaggcacaccacagaagctgttccttgtgtgtttgttttgtaggttagcatacaaagtaatgagcttcctcatgtcaagtgcacacctgtgtgccatacttagtttttgcacagtattgtagagtgtcctgctaaagaactggcccctgggtctcaagctgatggagtttctaaattaagctacaaggctttcatttgttccttcactgtttcccctccatctttttcctttgcaaaatggccctgtagtagatagttttttcctctaatacagttacttaaatgaatatacaggatggaacagagtagatggttcccttcaaaaggagaggactgaacaaaaagaagtctccacttccccaagagaggcctgggttatgaggtttcttttatctgccattcagttttccagaaaagggcaggatctaaagctaggcttcgctgccctccacgtagagacagtcttcctccatggaacagaaggttaaactaaaacaaatgtgtgactagagaaaggcgctattcggagaccagaggggctcctgtgctggcgctgcatgctcatgagttccacgtgagattattcagggtgtggatggaggtggggacatggcccattgctctgatagtcagtttccttgcttttacatggcaaggcagaggtttactgcatgatcagtaaagaagccagagcttctctagccctttctagcaagactctgaaccttgtgctggcaaatcatcctgagaaaggccagagcactctgcttcttagtgcgtttttgttttgtatgtcagtcacttactagggctgactaatggcacttaacccacaggggtttctgggcagttatgaaataaatcagattatctggacctgcccatcatatactctaagattcaccttttattctggattttcagtgggcattcaaccagaatcagctagatgtttcagagagctggaagatggcagaggatagtggagaatccctttttaacgttagggagattggaaaaagtgagtatgcagatgatttctaggattacaaccagcctcatccctagagctgattcttataaatcactcaatgttcgctcttaagttcatagtttgcctgggtcccaaatcaagctagagctttgcttgtccctgctctgcatcagaacatgaatactcaccaccaaatgctatttctgcatcaggcagaaataacatctgaactatagcttatatttgaaaagtttaagtgaagcttaagagcattatagcctaggatagaaaagaaattgtcacagcaagccacatcttttatgtgaaaagatagacttcctattgacttgagagcttcttactggttttcactccttataggaggctctgttgtctccagatcatctcaaccatgatagaggtagggacctagatagctatacaggtgactggagtgggaatctctggtttctttggagactcatttgtgtcatatgatgttttcctggacactgtcttatgagagatgttttcttcgggaagctgtctggtaaaagggcatgtgaggtttttgctggagcagatgcttgagagggcatgtgatgtttagaaagggtataagtaaaacccaacagacagtggatgaaggtctggctctggctctccttgctggtcttcactggtcttcactgactccggtcttcaataataacattattgcattggttcactttgctttcttcgccaatcttcacttgtcatgacttggtagaaagaaacacaacaaagaactcacaatgcttggcagagcttcttggtttcttctgtatcaagccactgctactgattcgaatggactggacttctgacaatgaagattggaatcaactcaaagaactacttctaaatgggtccacatcccccccttgtcctattaaccatcttcctcctgtacctttgattgctgggctataagggaggttgaagcatttaggaacccttattaaagtaggttttttaaaaaaaatctaagtctccctgtgacactgtggtctgcaggcactttaggttgcctaaggctgtctttagaacttgccctgtcacttcaaatcccacctttaccgtttcagccaagagttttggctttcctgtcaaagctgtaagaggcagctatccaccaccagagtgggcacagattaaagagatggcagtgtcaaaggaagacctcaccaacttgtttgttcctcctaggctcaagttcagtaaaatttgtagaataaaactgttctcatctaaaggagctaaggataagctattccgctctcattttacacaatgagaaactgaggttcacagagtggggaggcagaggacactctgcaggtcaggctgtggtaggtctgaagcctgggctactgatgaccagcacaaggtgccttctggagacaatatgcacaattagcgtcaaatctggggagggggaatcactttgaaatatgaaaagtgaaatgtctggaaaaatagaacaatctcaaaatggctttctggctctgggtaaacagtaaccacattttttttgcctgttggaggcctggtttttaatcactccacaagcagttttcatttctgtagtaaaattgcttgtggttctatttaatttgtttctgcaggagtcagctctggtgaagatctccgaggagctggcgggcattttagcacagcacgtacagctagtcaatgagaaacggttcccgacgtggaggaaattcctccacatgtttctcactcaaggtaaataagtctgtaaagttcctattgaggaccagtatgcacaggcttagttagcttctagttctgggtcaagccagggccaactcaaatcctctacatcagccaatgttggtgtagaaactgcttctgccgttgactgtgttcttttcaagcactgcctagatctttgccttgtacccagcctcctaagtaaataggaactgagcatagcaagcacgccgtgcagaagccagggtctgggcatttctcactcacaccaggcttggcttgaacagaggcctccatctgaactacatcagagacctggaacgatcctcagagatcaggtgtccttgcatatggttgttgggaaaattcaaggatagaaatggggaagtttctatcacagactggcaacaaaaggcctttactaaatctagttttctctcccatattctaggagagcagaatggcacagctcagaaaggtagcattttcaaaccagactctacagtctaggaataaaatcaaattcctcctccttcctcagcctcagtcttaatggcatggggaagtcagtgatacactttatttgttgtgttcatctcctcatttatctgaagtcccagagccctgtggggtgccacataaggatccatctaggcaaaagctttccttctctaagagatcacaatgtaaactcacattgctttacactgcttaacacatctacctgctgctgtcaagtgatgctgctgctgctgctgatagtattttggccttgatatataatgataaactgatagtactatcatgtgataatagcaatacaacaatactagcacagcagtgagatacactgagcacacagtaggtattatatgccaacatcatcctaagcagatacacattagcttacttcatcctcttatcattattatgggtggaaactgctctaacccttattcaaaccacagggaacccaaggaacaaatgattggatcgccccaaataatctactacacatggaaggtccataaaaagtctatccctgcttctgtaggaggcttggccagggccagtgagtctactcatcaggagcatgctgcagccctttgtcgccatgcatgtggaggccggaggtggatgctgggtgtctttgtaataatgctctgactagctcacaaaaagaatttacaacttactttttatgtaacttccctgtaatgtatatcttgttttatgttgtagagagtggacaataaaattaattccagattcagaataaaaaagaaaagaaaagaaaagcccacacctattaaaccttagtaatgttagatagaaaaaacatactggtcattagggtagaaacaatggactctggggaattaattccctctgagggctttgaccacaatccttggattctttattaacgtaatgagttgttctaagtatggcttttataaagtatttgtaatatttgtaattatgatcataataaagactacttactgttcattgagccctcccatgttccaagtaccaggctaaataccatagactcagtttctcaaacttcacaaaagcttggcaaggtagatattatgcctccattctataaataaggaaaaggaggccaaaggttgaactactcacccaaagtttcccaggatatgacaggtgtgagatagtctaagttcccttgctaaaacacagagcatttcctcctgctataagcatagcattcccttgactgtgtcttttcctctactccatggtttcctgaccaggtggcgtgattgaagcatacccacctgcagacagcgtcaccaacctcacagtagacatgctgatagaacctgatggagaagtcagggtgctgtcaatgggagaccagcttcatgctgatggcccctttatttcttctggtaccaccatgcctcagacctcagtggatccccaagttctcaattctttgtgcctccaaattggaaatatctgcaaagagaaagatgtggttggttatttttctatagatctggtgactttcattgatccgagcaccttagagcagcaggtaagtcgaatgtttggcatgtgtgacactaaaataccctccacactcatgtagcagacagtatcagagagcatccaatactcactgtgtcccaatgagccaactataaatttgcacctgtgccatccatgctaacctaaagaaagccagtctctctctctataaatacagggtcaacgttacatcagtcatgccaggtagaagtttaaatgactgaaactcatccaacctagctcattagttagccttcttctttctgtccattggtgctattgggaaactacttcacactgcccagggtctgaccctatctacagtgcattcttaaacaggaatgagttaagagctcttgcaatctgttcttttttcctgccaatagtttactaacaactcagattattattgttttgtttaaatagtatattgggaaatccttcagaaacaaaatgtctaagtaaccatgcagtcagtctcttgtgccttaaaagacaaaatgaccccagcagtaccagtcctagtaacctcttgctgaacatgtagcccctcctcctccttgtgcctaggtggaaacttccaccttaaaactggggtgggggtgtgtgataattgtatacatcttcacacttctaatgtacatggagacaccagaaatagtacataattccactctgtgttcttaactatcttagaggttatatatgctatatatgatgttataattatatatttatggtatgtacatatgacatgtgtagcatatattatatatgtaatatatatcctacagtatgcttttattcaaaattacatgtgtgatattgttcaagtggacatgtgtagctttggtgtcaaatattttctataattttaagggttttttgctatgctttctttccctctagaattttaatgtttaaatttattactttaagggacttactttttaaaaatgaacctctgtttttcatgttcagtgtctggacttctgatttaaggttgaaatggctttgcagtttccctctctccatatcctttgtcatcaaccactgtagtgtaaataaactgtaggtattttatatagtcattgttcagcttatgtttgctacttgagtcagatggtggtttcagagcaagagtttgttttgggcagtttggtgtttgtccaataaccattttccctattatttgctaagcagtatctccgcattaggtcaacaaaggagtccagtaaatatttattaggtgagtgagcgaagcccaccaccagtgctatttgtgctagccgtcatcacactttaattcatatagtcaaacagaattattttcgttgtattaatccagatttatcatttccctgtatccttcattttctcagttgtaaaatgaacaggttagctttcttaacttccaaggaaatttcagaaaattatttattccaatgatatttttatagtagttgtttactataacagcaaattcaggttttaataaaatacacttttgaataattatgagaaactaaaaaaatatgtagccatactaatcacaaaatggcagtatttcaaatttcccaaattttaataatagaacattttaaagaaagtatcatatataaatggaagcaaatactgtgatgacattaaaattcatgcttttgaagaatatttaaaagtgtgctatgcagagccttccctaactcagttgggagcctggaggactagatgtaaaagtaactgctgtatattagtagaaggttgacagcgactcagaaacaatatatacaaggttacaattttataaaaagaaatatatacacacatctacacagagcaagaggatcctgaagatacacagtaaaacaccacacctttgtttgagtatgagtagtgcccttctgacacctcacctggcaggaggctctgcagataccactaagttatgacttcaacaatgagatgggaaattatcttggattatctagggatcaattactcgcaggtttcttttaaggaggcaggaaagctgtagtgagagagggaggggacactactgactctaagctgtctgtccttttgtgccacctttcaccagcaaactcatggcagttcattacaacagaactaggaaagtagcaaagaaaatggctgctatcttgttttatatgctttctgcatttccctttttggtttaattaatgttcgtgtttatatttattcatttgttttgatgctatgggttgaacctacggcttttgatatgctaaactacaccccaccccctgcatttgcattttcaagagtaaacaaagatgtgttagatttctaatcagaggaatatatgaaaaattataatcatagatttgtgtagagtgttctggtttgcaaagcacatttgtgtccatgacttcactcacatatatcttagaatagacaggcaaagcagaaaactgcggcgcctacatccattcaaatttcttctggctagcccagctgggacctgtaatttaccatgctggcatgataggaccaaagggcactagggccaaggaaaagtgtataaataagaggggtgcactaaggacaagccaacaatgataaattaactctaggtaaggtgaaaagtctgtcacaaccacgggagatgagaatgagggtctaaagaaggagaacggaagaatgtttcttgaaatgtaggatttaaataatagatgccagacatccagcctgggataaacactgagattctgcttctagatagatagatagatagatagatagatagatagatagatagatagataaagtaggagcgtcaggcagaacacagcattggatgggcataaaatggaagagggctggtccctggaaatgagctggttggaacgtgaaacagacagtttccatcaggtctaagatttcagggtactgaaaatggggaaatcccaggcctttagggactgcatgcagaatgcatggtactccaggagacagtttcgtattaatcctgctgaggatctggccctctcatctgagatggtggggagaggtcctgcttagaattacagagcatacagttctaagaagaacatcaaatacctccaaaggatttgggttgaggaaagatggacatactctttgaacaaacacattctgcgggcctactctggatgtcccccatcacaggagcagagataaacaagccatgtgcgctgttagccactttatatctctcaaccagtttcacttgctataggtttatggtggtctgtactttttttggttcataggcatacatagtacctctgtgacgttttatatcatctagaaaatgcattaaggttgcgtgcatgctcactcttccatgagagttattacagtggcagtccccttagtttaactatctaattattatttgttagtagaagggcttttggaacttctaggaaatccagctcattggagcgtacccatttaggcaaaacactaatgaaacaagtgtttattgagcatctattatgcacatgccattatagcaggtgctagaaatgctgcagagataatagagatgggaaagtgcctgccctcaggtagtacacaatgtagctggggagacaagctagaaaaatgaatcacaagaaaaggcttaactgacaacttcaaagaacaataacagagacatcaaaaaggtaatgtcagtttaactgccaaaacacttgctgtgtgcattcagataagagcaaggtcccttctgtttggagcaatcgagagaggtttttacagaataggtggggtgggagctgaaggataattaagattgaaggagtgtaaggaagaatgtgttctaagtagaaagaggttgtaaagggtaatagtaaaaaccatgcacaacacgtatggagaaagatgataatctgagttttacaagtatgtttcacctcatataaatatgaattcatataacatttaaacagataaactgtcaaagatgcagtatattgaaatcccagatttacaaatcctttgcttgtagataactgcgaagggtgtgtgcatgggttcactatgtgtacatgttggggaagtgctcactcgtgtgtgtgtgtgtgtgtgtgtgtgtgtgtgtgtgcctgtgtgtgtgtacctgtgtgtgtgtatgtgcctgtgtgtgtgtgtgcctgtgtgtgtgtacctgtgtgtgtgtatgtgcctgtgtgtgtgtatgtgcctgtgtgtgtgtgtgcctgtgtgtgtgtacctgtgtgtgtgtatgtgcctgtgtgtgtgtgtacctgtgtgtgtgtatgtgcctgtgtgtgtgtgtgtacctgtgtgtgtgtgtgcctgtgtgtgtgtacctgtgtgtgtgtatgtgcctgtgtgtgtgtatgtgcctgtgtgtgtgtgtgcctgtgtgtgtgtacctgtgtgtgtgccggtgtgtggaggccagaggctgtcaggctgtcatcagctgtcttccacaatcactcaccaccttattctgttttgagatgggattcctagatggcctggaactcactgtgcagactgtcaggccacatgcctcctctcaagtgctgatttaaaggcaggtaccactgtgactttttgtttgtttgtttgttttgttttgagacaggatctagaacttgactgcctaggcagtaagtttcagagatgcatctgtcttgcttctcaaggtgcggtggggtgagaggcactcaccagcacacctggctttccacgtgggtgctggggtcgggctcaggtcttcatacctggacagcaagctcctgaccctcctagccttttcttccgtcatactaattattaaccttgtcaaaaaaagccctcatttatgagtgctaacagaaatatttgaaaaaaaaacccaggaaaaagaaactaaatctttttgtttcattccttgctgtgctagagactgaagccacagcttctcattctaggcgggaattccacactgcactcctccccaaacacagtcttttaaaacgatttatttgtttgtttgtttgtttattcatttttctcatcctggccagtttcccctcccttcctcctgccattccagtccctcctcccaccttctttcttcccccatatctatgtctcctcccttcgtttcccagggatatcaaccaaacatggtataaccagactggacacataccctcataccaaagctggataaggcaacccagtaggaggaaaggggtcctaaaagcaggcaaaaaaaaaagcacagaaatagcccctgctctactgttaggagtcccaaaaagaacaccaaactatacaaccacaatgtatatgcagaggacctaggtcagaccatacaggctcctgactgtcacttcagtctctatgagcccccatgtgccctagttagttgattctgtgggctgtgttcttgtggtttccttcacccctctggcccagcacaatcatcaacagagagacttcatccagcaactaataggagcagatgcagagacccacagccaaactaaggcagagcccagggaatcctgcagaagacagggaggaaggattatgggacccaaatccaatctttaagaaaaaatctgaaatgaaaaatggctacaagtgcttagtaatggccccctcatcaataggacaatcagaaaagatgacttatcacaaggggaaaattgtgaggaacgacaaaaatggagttcctggtgtatatcagactatatgcttctgctgctgatttatgagaaaaagaatgtgaggggaagaaatatttactttagagtacagtttcagagactttagtctatggctacttggctccattgctgtgggtctgaagcaaagctgaagtatcatgcacaagggctagaggacaaactccatccttcaagccttaccctcaagtaacctacatctcccaactaggccccacccttcacagttccagtacctcccactagtacagtcagagatgcaatccactgatggtttcacccatgtgtgccatattatatcccgagagtcccatctttgaatgcaggttgtatcagggacctttcatgggcatatcaagccgtttattctgaaaagtgtttctgtgggtgtctacatacagaaaaatcacctaagaacatttcattgtaatgctatttcagcctctcttcactctggctagtatgatactttagataattcactgggccttgatctatcattaacaagtggaaaattcctccctgtttctcagaggatgttctgagaggctgagcagatagatacaaggtgctgtcgttactaaatcaaatgccataagcacatgtaaaactgtcacagagaccctcagcaggttctctaactgtaagtggaatctgaatcaaattagcattatttttaaaaactcactgagcattatcatctcaaagtgatatataagcatcagaaatgaatacatttatttcagaggatgcaaaacccgaggtctacagaaacatcataattccttcttgttcatttctgtaagcccagcacctagcaccctgtctggcagataatagatgctgaataaatatttattaaatgaatgaatgaatacttctctctcagtccccctctggtaatatcatttgcaagagcttcttatctttgttttcaagatctataaggaattcaccaagggagctcaatgagatttacttcccctctttagggaaggtattttatttatatataagagggttaatagtggatatctaaattaaaatttaataggcctttggtataaacagaagtgcctattagtcagtgtttctaaatgctataataggcacactgttaatcacaacttaatacctagcgaaggggaagtggatcccagaggatcctgagacagtgaagcaaagcctgtccttgtaaaggtttgcacctttgtcagtgaaagagacctgcggcctgtgagtgatgatgataacggtgatgagcaagggacaccagcacatggtgacaggtttatagtgtgaaattacatcagtgaacaagtggccgactttgctatacatacaatattgccatatgtgcttattcttaatgtttttattaacctccttactttacaatccctaatgtttaggaagcttgaatccaagcctgagcctcagatcttgatggagcagcctgtagagcttacatagtgagcttgtctcagttacctttctcccacagatgaacacacctaaacgagaaacagtgtgaggggtgagacttgagtccagttctagagggttcaggtcagggtttcacttgggcagaaccttaaggtgggcttatacggcaggcagaggagtttctttgctcctggtggacaaggagagacatacacatggggacctggggaagactgagctctcaagaacctgcctccagcacagtgctgcttcacctgcactctaccacctgaagtcctcagaaacccccagaacatgagcacttttcagagcatgaacattttgcggggatacttcacatcccaagccacagtagtcttgtttatgttagtttctcccaatgcctctcacatccttgtttccttttagaactaagacacacttccagggcagaggaactgtgggcatactcactggctgcacactgttcagaaggcgcacatttacacagtactcaggacagtgagcctgagggcagagacgctttccttaatgctgagaaagagcagaccagacagttccctacacatctaatgtgccccttgccacgtaacacggcagaatcaaggctgacgctatcctcctacgtcagctgtcacctcactttctgtaggatgaatgatcccttgcaaggctgtcctcctttctctccagcattattaaggtatagccaacaaataaaaattggaggtgtttaaggtacacactgtgatattttaatgtataagaacactgtaaagtgattatcacaagtttgataacacacccactacttcatatggctgcttcgcttgtgagaaattactcctgtatgccagtcttcaggcacacagaattatcagctacagtcacaacgccacacaatatcacacagtactttttttttttttttttttttttttgatgtaaaagcatgaggtagtttaatgacggagctccgggccgacacatatctcccgcaggagacagaggtgtcgaccacatggcggagccataatggtggagctccgggttgaaccatatctcacgcaggagacagtggattcgaccccgaggcttggaagctaggaagctagggatttttatagaaaaggggtggggctgggggaggaattggtgtggtttcacatgattggtccatttaaacatcagcagcctgttaacatttaacttaggtcagaagggtgggagatagggaggtgccgggccagtccggcatgtcattctctttatctttattgctaagcagcctcaggaacatcttaacgacgggcctgcccgggcatgtcctggcctgttctgctatgttctcagccccaggtttcaaagctcacaaacaactctttgggctatttgacatatattacatgaatcacaggtctcaagttttatttcctttcattcccctcttcttctactaagtaattctaatcttagaattttagaagtctatatctctatgtggagaatagatatcataagaacaaaaacagaataagaagggatagtaaacaaaactaggcagggacccttctagtgaggcttgagggtctgggcatgatgtaggtgtatgtagatcagatctctggctggaactggtgagatgtcttttggggtacctggctcgtttgctgtagccaattgtgaccagccttctttctgcaccacctgcaagccttttaacttagcatacagattattattacaataacatgtaggtttaaacacatcatttaagacagtgatgggcatgggggccccaagagggagtattttcagttctaaatagggcaaggggaaggagcaccaagtctgcaccagtctcttttagaattctattcatcttttctacctgtcctgagctttggagcctgtatgcacaatgtaacttctaaccaatctctaacatcttggccagtccctgatttacctgggcaacaaaggcaggtccactacctcgggaagatttcttctaggatcttcttggctatcacattggccgtctcagtcctgcttggaaaagcttctacccaccttgaaaaggtgtcttcaaccgcaaggctactgccatccttgtaccagctcgaactctcaggccaaggctgatctgatccttcagatcattttgagtaccagtttcttctgccagaacgtcagtgcagtgatgagtagggcagtagggtatcgagattgaggacagcaggtggagcgaaggtcactcgttcagtcaacaaaaagctctgataatgtgtcacaggagcgttggtcgtcatccatcagtcagggggcttttggataatgctttcaagagtgtggggtgccactacagttatttgctgggacagaagttttaagtgggcagatgtctccctcgatggttagcagcttagggcggggccaccctccaagggacctttcagggttcctgggtgtcacacagatcttggtgggacctccaaatgaaagaacctagtggggaaacccccactgaattcccgattcggcatgcacccaagaatcacgaacagacgaccatcttgatgtaaaagcatgagatagtttaatgacagagctccaggccgacacatatctcccgcaggagacagaggtgtcaaccacatggcagagccataatggtggagctccgggtcgaaccgtatctcacgcaggagacagtaaattcatcccacacagtactttttaatagtttattcaatttgaagtatttctcctacctcctgacccctgctagacatttttaggttctatatgtaggtaaaaccatgtatgctcgtcttcctatgcctaacttatttcacttgccatagtgtccttcaggctcactcatgttatcacaaatgttagaatttccctctcaatggctaatatgccattttgtgcatctacatctgtatgtgtatacaccacaatttctttatctatcaaccaattaaataactgtctcaagatcttgggtattatgaatgatgctgttatgaacatagagatgtgtatctcttcaaaataatgactttattttctttgggtatacacccgatagcggaattgctgaatcatatgataattctcttatttttatttatttctaaagatttggggatttatgattatttttaaatttttctaacttttaaaaaattttatatttgcattatgcctacatgtatgtatgtatgtgtaccacgtgtgtacctggatcagaagttccccagaactggagttacagacagttataagccactatgtgagtactggcaactgaaaccaggtcctctgaaggagcagccagtgcttaactactgagccatctctccactctccctattctttctctttctcaggagacactgtaattttttccatactggcaatggtagttataattataataatatactatatctttctatggagccctggctctcctggaacttgttatgtagaccacactagtcttgaactgacagaaattcaactgccttcatttcctgagttctgggattaaaggtgtttgctgccacatggggcaatgaatggaccacacccacaccatggcaatagctgttctaatacatgtgaggatctcatggttccaatatgcatgtcattgataattagttgaacacccttcatatgtctactggcctcttgtatgtcttctttagaaatggtctgtttaatctcctacccatttttaagtcaagttgtccattgctgttgagctaatgggctccacaaaactgtccttaactctcaataatttttcctgtagcatgaagttggaatgacaatgatacacaggataatttgcctcagatattacctattccctcctgcaataaatatggtgttatttgtggattttatgtatcacatccataggactctccaaaacaagttagtgactccattttcaacaaatgtattatcttcctacctctcagtctgcctttatcccaacttgcctttcattttttgtctgttagtatgcaagttttaaattccctcctttcaaaattcaactctacatggaaacctaccttaattaatcccctttcaactgctgcttaatcttctagtttcatggagctgagatgtgtagtaccaatagtcagagtaagtgctctaataaccattgtaaattattatccctaatttacaaatgaggaaactgtggctactatgccatattcagggccacattgctatgaagcagctaagtcaggttccaaccatgacttatgtgactacaagcttgtggtctttcccagctaacactgtagtgctgcacaggctgatgatgactctcttgtaagcaccacccccccgcccacacacacaccagagaaaatgtctattcccttgcatttcctcaatatgctagttgaattgagttgaacagcttaaagccagaaaaacacatctcctatttttgttaatatattccatccttgtgctcagcacataaggtaatcgttaaatgttaatgactaagagaaatggaataaaatcagtgttgtggtagccatttttaagctttaagagtttaaatgtgcagcccatatactataccacagctgggagcaccatattgccattaagccagaaggtggattcacgggatgggaacattgaaaacagacaccacaagaatggctaagtcagttttccaaaccactttctataagtagctgctgcacccccacacccaccaccaccaataataatttcacaatgattagccagactgttaggtaaggaatcccaggaaacactgtaagaggggtttagagtaactgctcaagtatttagacaaaatggaggtgactcaagtgttaggtcaaatagtaggggcacttaggtaggatcattccccttccattggtgctactgtcgacccttctagcatgtaatttgtcattattcttgtaagtgtatggataagtgcagcccacatccagtacacatgggcatctgagtatctctcagggatggaagtgctgtcttacgtcaccagtgtctgccccttttctttctttgctcataacacaagtttcctgttttgttttgttttgttttgttttgttttgttttgccaagcccttcctatgtagctttttaacttaattaaatatataggcaattactgacaccatctgtctttgcagaaaaagaacaagaagtggcatacaagcctggaattctgaagggactcctttaacaaaatcttctagctttatcagcggtattagtttttaagagcccttctgttatttttaattatttatatttctctagtaataactaatttgagctaacttaaaatgtgatggcattggtatgttttaaaaataaaatatcaggtagtgcatgacttttcagtaaaacaacaacataaacatgtggttgaacatctgttactagtacagtctaacacagcacttaaaatcctttataaaattacatgaatcttttacataaatagaaatgttttaacaatacgcatattccttccaacatatatttcactttcttaaacataagatttactgtattgttggattcaaatccttatgaacaaataaaaaggcccccttcttgtgaagctgatctgctcatcacgccacaggcctggctgacctggaggacctacttaacttaggcctgttgttttttttaacctctctaaggttctatacaaatttctacatatataaaagatattaaaccaaccactgaaatctgttcaggcagagtaaggaacctttacaaaaaccaagccccaacaaatcagtgaagcccacccctccctaagggggagcacgggaaggcagaaagctgacaaaagttctcctaagtttagcatctacttccaggtcagacaactgagcccttccctacacatggcgaagcatgtgttgactatctcctactacaccaccgcagtgaggttccctaccctctgcaacagacgtgcagagcacgaagtcatttctaaagctcaaaacaaagacactttccaagtaaataaataacactgtgaaacttcaagtcacgttgaagacctagagaatatgccaccccagattttagggggtatgaacaaaagaagagagaaatatgaaaaagtaatttcacaattgctttttatgtgagacatttagtgggcataaacagctaaaactcagatttgatccttacagatttgataactgagagccttctggtgaatccttcagaaatgaaagcacattaagagacagtgcagtgaatgaatgggtagagaggaggaggaagagaaatggggtagaaaaaaggaaggatttatgtatttagacttgtacaaccaccacctttatcaaatttgacatttatttcactcctcccattaattctgtttgttcatttgttagaaatctactcaggggtcattggttccagagaggtggtcagttacaagcagcctctgggggcagcttggcagccaggaggttaagatgggcagagcccagggaaggtaggtgggaaagccagactcaccacacttactcagacggaagtctcaagatgactttttgtcagtggtgaatctactagaatgtttcccaaggccccagagcttcttcacccatgtacttctggaaagaatttcaggagttactggtctgaggtaggaggcttggacagtatttctctgtcctgacaaatctctggaaatataattctcaaggtactctacagataaatgataagaaatgaggcagaaggatggtaagatccacagggaattgggggccctcctggcttcagaactatctagtaactcgtggcacttcctgacatgacttctctggcccagctctgtcctcactaggatcaagcatggcagaggaaacctgggctctggactttaactccaccgtggcttggctggaatctttgaccctccatttccacttatataaacacatactcactatctactccacaaggctgttgtgaggatggcggaaaaaaaaaatcccacagagccttgcacttaatagcccttagtactcacttcccttcctctttcctctcccacatttcctttctgtagtctgccctacatgagatcaaataggaagtttcctaaataccacagccataagaatgatgacatgctgtcttgatagaatgatcactctttcaaacacaagacgctgtaggcagcaaagacaaagtggaatccaagctgtcttccggataaccagcctccaaaggctgcactataataaatatgccacctaggagccatgcctccaccaccaccagatcattcaggatttagtaaattactgggttaatgtgatggagatgagaaggctccctgaggaggacatagaaacttggggtgggagatgcagtgtggtgattgagcagggtaagaaggtggaaggtgtgtcttgggctcagctttcctaggtcatgtgttaaccagtctgaccagccctgcctgccttgtggatccgatggtgccccacccagaagctgacataaaacgaaagcctgtgatttagagcaggaacaagttgcctggcttttggaagagtgacactgtgtccttagagggcattcagtctacctgatactttgcttacgatattgtgctaatgagttgttatctcctctgtcccatggctgcttactaagccctgtgtgtattgtgggtcgctagttagctttagtgtatgtgatggatatttgttggacatacatagcaaagttttattaggttctgacttgaaaagtagctaaggcaaacccagaaggccacttgagaggtagtttgtcatagacctgtttattcagttatcatctatacccaaccacagtcaaataagggacacacagattatgcaactgtctatactacaatggatgtgtgtgtaacaaccttattgatataccttatgccataaaggtcacttccccaaaggaggtacttagtagttctgcatgtatttagacttgcacaaccaccacctttatcaaatttgacatttatttcactcctccccatccaatgactatagaacccttagtagccatttcccatccctcttctccttatccactgtgaactactttctgtctctatggatttcattatcttaggcatctcatgtaagtgtgatcatacagtgggtggtctttggtgacttttctttgatgtactgtgttttcaaagttcagtcacatggtagcaagtattggttgtaccgatgattcttttttatggttcagtaatattcttttgtatggctataccacattttgtttttccaccagttaaaggatattaattgcgtctacttttcactgaaagagcttggatgacacaaagctctttgggtcctgatccttcttaagtactgactgccagaggcagagttagggcagacatgataactcagttgtttgctctggacttttgttcttagagatggaaagacaatgatctttgctttgagcattcatggaagtttttgcagaaatacgttttcctttctttgcattacatgtccactagtggaatctatgggtcacagtgtaacacagtgtaagtttagcttttgaggatttaactacgatctcttctcatgttgtttagtttaattatccaatggagacatattgattggcatgacttctatcgagtgtcatgctaggtgttggttgggatacagaaatgtaaaaacaggcttctgttcttggcctcattttctttcttggaatgtctcaaacttaaataaactagccttggatttaccaccaagaacattgaactgtggtctgaactctgctctcatccatgtctcttccttgtcagagccttgcccctaggctctaaagcaggtgggctagatgaactctaaagccatcactttcacaatccatgtttcttgcctatgtagtctgcaaccagaattattgtttctaggagactagggtttactggggctgcagagcagcctagggaggacaggggactgtactgggatgcgttgtgaggcctgaggcctgtgtaggtgctctcctcctcacccagagactaccttgctttgcacaaaagtcctccatgcacacaaggactgcacacagaaagcctccctgctacacaacaagagctcttctgctttgaacactcccacaaagaaagccttttagatcagacaaagcacatcctaagggccggccacttctcagagaagccggtcatcccccagccctgatatacagcctgagagtcactaaccgccacacggagtgtgggattccttctctccatcacatgcaggggcaaacaatcaatagtcctttaaaaactggttatggaaattagattttcatgtttactaatgtttagtgatcaatttccaaataagaaaatggccttccaaaaagccataaaaaggcaagaaaatgcttaagcagaaacaaaagaaagaaaaatgagtgtgtaattctgtacactaagattataaataataccaattaggtcatcagtttttaataacacaagaaggatcataaattgtgatgacagaagcccagagtaggaaacagaaaatgcaagagtgtacttaaaattgtgatttttttttaaagtgagaaacagtgtagctgctgctgctgcagttttaaacttcatttttttttcattttagagaaccaaattaatcaatttctagtgtgatttttggcatatcctgaaagaatttctaatgtggcagagaagttcctagtgccatagaaaaagctggtctattgatgctggtaactagtgttacagatgagtgagactaagggttatgaacttgggctctgctaccagttagttcctcattgaatgacaggagctgagagagtctgtccacctcccacgtagtcagagagtgaggaggtgggtgagaaggttgttctgtgcttccaggctagaactgcctcagagcccacagcacctacggcctttccagttttacagatgtttcacctgtcctcatcctgtagggtccaaatgcactcgaatggaatctgatttaagcatcctttcttaaaaagtgtcgttactttgtggacactttaaaaatatttcttgttattttattccaaattttcatacttggaagccattaacttttttgttttgtctttttttgttttttgttttgttttgttttcaaaaaaacagagtttctctgtgtatttctggctgtcttggaactcactccatagaccaagctggacccaaactcacagagatcagcctgccactgcctctcgagtacagactaaaggtgtgtaccagcactgcccagttgtcattaactattttttaaaatgtaaatattttaaatctaaatatctaaacgtttgaaaatcatggaggcgggaggcatactgggttatttggccctgactgctaagagccgggactcgggtgctttattgcctctgaccctgtagactctaagaaccaaaataaggccctgagtagggcgggagatgtccaaggatggatgctttagctgtttgaagatggccttatggagatgtaatttgtcatgcccgaagggcaaacaatattaatcgcagcatgggaagtacttcaggagggactccagaagtttcagttgttgatcaggtagtctggttagggactgttcccatctcttagagacttctagaaaacattgggctatcccagaaatggccactaggtggcaacaggccaagaggcagctgttcctctgtctatggatttgttttaatgcaatgcaaacaactcttactaaaatatcacaatcatatttacaaattaaaaattctgtcagtgcagtgtacccacttacttaaacattaagtgtcaggtatgtctactacatggagcactcaatgctgtctgacattttaataatccaagatgggaagagatgtcatttactatggcaaagagatcactacttcatgtttatggagatgctggggcctgttctgcatcctgtgtctgagatgaaggcaagtatataaaagtcagagtccaacaactgagacctcctactaccctgactatcaaactgtctccaaagttctatgggaagaatgatcatgggaacagacagacttgggtctgccaggccctacagtaatagcctcatgtagtcacctcaccacagaccacagggatccatgctgttaggcccgctgtgtttggtttgattttgcagtattagtgattgaacctaaggcctcatgtgtgctaggcaaatactctatcattaagatgcagtcaccgcctttggcttgtgttaatagacaaggaagtagggccagagagagggaacaaaattgctgatgaccagacagacagcagaggaaagactggcatcttcagcaagtccttgtaactctggtcccagggtctcattccaggaggtcgcttgcctctgctaaaccactatcctctttagtctttaccctcagctgcggatgcttctctctccctacttatcgccctagccttcaaaagcttagtgcatgtggaccaaaccatggtgagaagcaggatggatgactggtctctaccacagtctcttagataaggcttcaggtcctatgggcctcacctgtctcaagaatgacaacagagatgagatgcctccttaccagggcctgatttgtctttaagcctacagtatagcccaacacatgctcctgaaatacagtgagaaagaagaagtgccttagctctcatcctgtccaccaaaacattgtccaacagaagtatctcaagctgaacaaacctacccctgaagcctggatttaccctgtaacttgtccttaatctgctctactgggaaatagtccttccattttctggagaaatttaagatatctttgattctctgactcttctttttgtcacatgtcccacacgagacccatcaggatgtcctctaagatctgattttgagatgtgtctgtgtcctttcacccataatggttcccattctttctgatctttccactgccatctgtcacccaaacttctatggcagtgtcatcctgactagactcatgtctccatccttgacagtcatagtttcttctcttactgcataccagctcttcaaaaatagacaccagaacatgtaattcctctctactcaacaccggtggtccaacaaattctcagcctctgatattgtatcctcgccccacactgggtcctcctctttggtaaagcgcaacaaactagagacagttaagccacaagtcctttcttgccacttagtggtatatggaaaataagccctttactcaccatagtcaagccagaagaacacaaggaaccttggactccccacagctggatcctgccacccacagaggagctagacatataacttggcttcttcagcttagccattgctgtgttgctcgtgggtttgacaggtggtttggcctttctttaggaagaatcaaatggtccaatgatagattttccatcagatttagaaccataaatctgaacaaaaacatgggtaagggcagtcattcctatatccctcagtcaaacaggctgctgaggagaatggctatacatcacagcttactctgaaggcctggttaccagctctgtagtgggtgaattctcagtgctgtatctcttaagcttggtcaatttgcagaataagtctttttttttttaattttccaccaggtggtaaatcttcacaatccctaggtagcgtcatagacatgtctggaggcaatggagggatggtccacctggatcataatcttgaggtactagtcaagggaaatgtcacccaaaaaggtgacttaattgtatctcagacactgatagcataaacctggatcgttggcctcttaactgctcagagcctcagtttccctacagaaaagagaagggggtgaaaatgttaagatgagtttgtaaaaaacatctgtagattctttttttccccatttttattagatattttctttatttacatttcaaattttaacccttttccttgtttctcctccaacctccccccatccaatcccccttcccctgctcactaacccacccattcccacttccctatcctggcattcccctacactgggacattgatccttcataagaccaagggcctctcctctcactgatattccacaaggccattctctgatacatatgggactgaagccttgagtccctccttgtgtactctttggttggtggcttagtccctgggagctctgggggggtctggttagttcatattgatgttcctcctatggggctgcaaacccctttagctcattgggtcctttctctagctccttcattggggaccttgtgcttagtctaatggatggctgtgagcctccacttctgtatttgtcagacactggtagagcccctcaggagacagctatatcaggatcctgtcagcaagcacttgttggcatccacaatagtgtctgggtttggtgactgtatatgggatggatccccaggtgggacagtcactggatggcctttccttcagtttctgctccaaactcttaaagctcacaaattctggttcttcgatgcttactacataatctataaccttgtctctcagtctcatttttaccctcaggctcacaaaaggcagctagcaagaagcaagacaaagctctttgccatggaacttgacttgcacttgaagacaattacagaatgtaggaccaaagcacagctgcccacatctgtatgctctaccacccatccattctgcctgtcaccagaaagaggcagaagcagcaggggtgagcaggcggcctccatctgcccagagtacctaaggcaaaaggggctttatattaagtctctctcccactccttctcacatagaagcacgttgttgccttgtcataccaaagaacctgagagcagaacaattctggcccgtgttagttctctaaatccaggcataatatccagggaggtagagagctaggacctcctcttccccacactgggccctcctctttggtaaaggtgcaatggattagagattgttaagacatatacataagtattattttcaagcaatcccacgtttacaaggtaacaaagagttgaagataagttaacatttttacttaactcatcataaccagagtagcagtatttcagtattcattagtatcaaatattattcatgaggtattcctttttatcgcctcaatcttggagattcagcatgtgtaccagcaacatttcaagtgcccagtggctacatgtgctggtagctaccatgttagatggtgcatatcctgaatgtgtctgagaatatccatgaaagtgcagttataattctgctaatattgacactgatggttagcatgtcctaatattctcatctggtcttttgtgtacttactatttttgcaaagctcgggttatgttgcttatgtgactgcttatcctcctttttgtacacacggtatcctcatgttattcacaatcatcatctctcataataatatcacataccatcttatcactcggatatattctaattttcttatctaatgctcaaatgctggaaagctataggttttcagtattgcaaataatgcagttggtggtggtgtttgtgttcttttttgtttgtttgtttgtttttgtttttcaagacaggatttctctgtatagccctggctgtcctggaactcactttgtagagcaggctggcctcgaactcagaaatctgcctgcctctacctcccaagtgctggtattaaaggcgtgcaccaccatgcccggctcgttgtttgtgttcttaaggctttggtgtgagtttccctagcattcttgctattttcagcaaaaccatttttgaaaagcatcaagcaaacagttatcatgtgacaagaaataggacttgtaggttctgctgcacctttgatgcttagttgtgactcagagagaaccacattaccacctatgttagagttgcttcatttataaagtaaactgatcatattgggtgatttttaaaaagtctttcctgcactatccttaccttcaaatctaatcaattaatcctcaggctagtcattacaagccatcatagcaagtcatgtcaaagtcaccaccattgtccttatccattctcagagtggtttatatacaggccactgtcatggctcgcttgtgtccactacaggaaactgtaagtttttaaagttaacattgaatttcaaattcaaaaataaggttaagtaagaggcagtaagcacatgggacacgtaccaaggaagtagagagggctatttggttgatctgaaactggactcagccctaagaggccccagagacctgctcctgaatggttctagaggcaatcacagtatgatactggaatagagtgtagattctgcctcaccaaccatacccccacacactggggccgtgggaagacaaagacttagcagcctcccctaaaggaccaacaatctagagggggagatcagatcccctgtacacaaacaagcatgccttggaaaatgttttcagcatgaaaaaccagatggaaaatggaacaattatctgagcaaatcaggcaagcctgctgttgaggaagaggcttcaggaaatgtgtcctatttccttccagaaccaaggggatagggcagcctggggaagcaaaaatactagcctctagcaaattcagagcctagccatgctctaccatctcaggtaaactgtgaagcagtttttggtctcagtatctttacaagtaaactggaactagagtagtaggcacctggcccaaagcccaccaccacagccaaaccagttaggaaatggtgccatctgataaccacacaaagtctgcctcctaagactctttttaaaagacagcatttcccactgttagtctaggctggccttgaacttgtaatctttgtttgattcagcctcctgagtgctgagattatgggcttgcaccactgtgctcagtgaggaatctgttcacttaaagggaatgcttagtataagtaacatttgtattcaactttatcaggcaattttatgtgtgtttgggggttttgtttgtttttcaaaaccccacgtggtaggtattgctgtttgtacctgacctgatccttaaggacactgagactgagagcatacattagatacaagtctaatggtttgctgcgtgtgaggctatacacaggcaggcgctccacaccttggtcctgtctttccctatacattatgctgctttcttatcaaaagccttgtcaccaagacatcaatatagttaacaaaaacatcagtaatgttttgtgtatctctttttgaacaagagcaccaaagcatgagaagagaaactctggagagggacatgtaggaacagcaagctcagtctctcctcatagggaacaggagatttctgtccccatctgatttacatgtaattctgtacagcaggaaatatttaagttgacaaatagcatgtttacaactgcagcagatacttggcagttagttcttaacaattgttgcaaatgtgatttatttgttgttatgaaagaggattactgtgagaatatgatcctgaaattagcttcagtttagcaaggggccctgacagcttgaccccttaatattcttataatgatgtcatttacattcaatgcttactcaagtcactcactgctagatttgtgagagaggagtccactctagggcagatgtattatgtattttaacatacagagttggtgagtggggcacttgtaggccttctaagaggaaaaaaatatttaatcaaatcttcatgaaaatgtgttagtttccaacttcctacggtgaaaatgcattactgataattacagcatgctccagaaatacaatactttatgttttctccacaagacacttccatggcataggctgcattaaacaagaacacgttctgattctctgcaactctgacttttaatttgactggaggattggtacagcatcaataccctctcttccagaggtgcatgagaggagggtgggcttggggccaggcagaaatgattagaatctgagtgccaccccttacttactctggagacttaggtacctcccgaacctgtttctctatctgtggcatggcttgtagtttttaaagtacctagaaagagcaaagaagtctgtgttcacaccagatgttcttggtccacgcaaagcatgactttattactagtttttttgtttttttttttttttttttttttttggtttttttgagacagggtttctctgtatagccctggctgtcctggaactcactttgtagaccaggctggcctcgaactcagaaatccgcctgcctctgcctcccgagtgctgggattaaaggcatgcgccaccatgcccggccactttactactagtttaaaggtcaaatgtcaccttcagaggcagcctggacaccaccagccaaacccagtctgtcctttctacttccataatcattgttacagtgcacattacactgatctgtgatgcactgagcatatgtggatttgtcatcttgatggcatgacctagtgactctctagtgacatggcatgatctgccataatcattcaacaaagttggattctgggtatctcatgggagtctaaaatgacaagtcaccttaaaggaaaaggagaaggtagcacatgacctacttttgtcactgccagttaaagacatagtagatgctcagtaaatgtctgtcaaataaattaataaccaacactcaattatctacctagcccacagtaaatatgtaactaacctgtctgtttttcacagcatttaaatttttgtttcgttatagtctgctcagaattccaggtgttatcatcaggtcactgttgagggcgctgtgaatttgcaggctgataatgtaaaatagaagtttaaaatggtagacttaagcttacaccttatctctggaatgttctgataaaaatcacatttttttttccaaactcaaggcaaactctcctttcttaccccatcctatctgcacacacttttccaatttagttaccaccctccttagcttttattcagtctcagtagagaacattgccctgcccacctctgaaatgacaaaccacaggccaaacaaaagaaatgaagtcaccaagagccaagacctctgttgattgtcttggccaggtattttcatttctttaacttcttacataatcacatatgttctaatgtaagaaacaagcttcatccctcagctatgtgatgtgggaacagaagcaaagacatttactcaagaatctcattggccacttgtttagcttggcctactgatctagttgggagtggaatggctctctatagtcttctgtctcatcctaccctgacttctctgactcatgttttaaccaggtatggacaacaggcctcaacctctcatacagtgaccagctagccatgacgcagctcaccctctacctgacaaatggtcatctgaattgtagtctgagcaccctggaagtgccccgttttactgaagattcagaaagggaaaggaagcgccttagcatccaggcagagctggtgagcaacagattctttctggttgatttggcattgagcactgctcaactgctaagtgagggggaaaaaaaaaagactgaaggaccagacagatcactgagccttttcaaaacaaagtccataaatgtgacagtctctgccataaaaagggagcagccaccggggaagaggaaccagggtgtgaaggcctagaggccacagctttctgtttgggcgcctcccagttctcttcatatttctctacacagccagctatttttgacagccctcactcctattgttctagtcaaaatttccattttaagcttagactcctagaccccaaacccctagacttggttgctctgagtcttcaggtgaagcaatttaaagatcatctatctgatgatctttccccctgtacattctcttggaggatcaagccagaggcctgacattcctcagccccacaccctgccaacaactgggctacaataactttagctgctaaaatgcctcagatattacctgtactctgcctccatgaagatatcaccttagaatctgctctaccatctcatactagaatgatagaactcccctaagattccttgtctcccttctttccccttggcctaaaaactacagtgaagattgctgcaaagtaaaaagtgatttttacctgggattttttttctaaatagaaaaaaaatttttcagtctggcatggtgacacacacctttaatctcagcacttggaggcagaagcaggtggaatctctgagtttaaggcctgcctggttcacagagcaagttccaggacagccagggctacacagagaaaccatattttgaaaaataaaaaacaaaaggcatttaatatatattgattatggttctcctcccccaaatcctctcccctccttcccatcaaaatttcatgcccttttattttgtctccttagaaaataaacaaacagagaaacaaaaatgaaagaactagacataaaaccatagaaacacaaaatcagaatccataccagacaagcaaaagaccagtcagatttttttcttaaatgcccaaactaagccatatgagaaaaataccactgaatttgtcttgtgctggcatcctgctgggccggggctacccttacccttacatgtggttaagtgtctttaggtgagactccattagagaaactaatttttcccttgcaaaagaatgtcaactggagataacttcctggtgagaggtgggagtctttgtccacttccacatttcagcactggaaccctgtctggattgaacctgtccatgctgccatggtctctctgagttcatatgggtattagtcctgttgtgtctaaaagacagtttccttgaagtcatccattccctaaggctctcaagggcctctctgcctccccttccacatagttccctgaacctgttagggagggagttggatcccatttaggactgagtgttacactcacattatccaattgtgggtctctgtgttattttccatctactgcaaaaagcagattctctgatgatggctgaatgaggcactgacctatgggtgtagcagaatgtcctaaggagttattttattgctgttttcctttagcagaacaatagtacttgttttttttttctaggtccatggcttatccagtctcaggttcttagccacctgagcactgtcaggtatgggttctatctcgtggagtgaaccttaaatacaatcaaagagtggttggttactcccacaacatttgtgccaccattgcaccagcatatcatgcaggcagtatcattgcagggtttgtagttgggttagtggtagcatgcagagtaccttccagtgccatgaacaagagtcagtaggggtgaaggctgtggttaggcacaagcttgactttgtgcaataaggtcttacaatcaagatgtggagcataaccaatagtcttggcaataacctgagatgtttgggggtctccatgggttcctttgactagtgactcaaccagatgtaagccattccagtattagaggtttcatttcctagccatgattttaaaagaccagactcctgtgctcttcctagcttggctaatgaggccttccatggcctgcctctctgtattactgtctcctttgttatcactaggatgataggcctgagacctgctgctggtgaggtttagcaactataggaacagaggttgcacctcgaatcagtagcatcctttcatttcctccctcttgcccctatgtgtcattcctagctagaggccaagaatgagaactctgtgaagactattggatacttttagaaactccctacacaaaacagcattataagctgaaagaaataaaatgtttctagaatcatggcaaaaaggctattctgggtttgtggcgtgagaataaacttaaagtgctttagatctcagagagcaatagattctgccagcctgaactactactatttatgcggtaggccccaggcatattacacattcaataagttcttttttaaagcatgtacatatatgtacacagtataattttcagccaacctgaaactttccaagcaagtatggacatactatgctagtgtcaggtttacaatcagcccccctttgaagactgaaggaggtcactatgaaaggatggcatctctaatgagcccactctgatcatgacagcatattcggaactaagaactgtaaggtaaaatactcctagtttgcttctattcttttaataatgtgctgggttgaggaaagaaacaaacaaatgagcaaataacctgttctagactctcaggagagctcagagatgtccaggcctgatccagactccttaccaccagcaaaccaaccaaccaaatacatttgatagcataaataaagtctgagaaatcccagatatgcacactttatggagaaaaaggaggggtagggtaataggtacgaaagtacagtgtttgctgcacaagcaaggaaacctgaggtcaatacccagcacccgtgcaaatctgggtgcagtgctgcctagatggatcaacagtctccagccagtgagcaaccctgtctcaaagaagaagagatggatttaagaagacattcagtgtcagcctctgcctgcacatgcatgtgcacatggaggccctaggtgcacatgcatgtgcacatgcacacactcactcacacacacacacacacacacattcacacacatatacacacaaagggctcattttttttaacttgtaattaacttcaaaatcagcataaataatcatcctttaatgtcaactttcactcttcccctgacttcttggaccttccagaccacagctcctgagtggccataaaaaaaaaaaaaaaatctttgctaacatcttaaaacaacccaagtcatttatacatgtttgaacagatatgatctgtaatgaatgattaagtaaaacctttgtgttaaattatgatgttaataatgactctgtctcctgtaatttattatgaattctcaaatgctgcgggtttgattttgatagaatgcagccacatcagagtttatgtgatgactttatttttagaactccttcgttgaaggcacacatttccccactactgctgctactgtaattatgtacaaaaccaatcactcattagagttaggatacattatcttctagacagatgaggctaaataagcaacacattaataattcagagagcagttcattatgcatgtggatgcctgctttctaactgggataagaacctcatcagcctctgccaacccttaaacaatagttctgtgttattgcagccacattccagtttacgcttgttaaactgctacttggattattttatcaaacattcatttatttgtggtcccttactgccgagaacagattttggaagctccttttttaagttaatgatttgagcaatgggtgttattaattctcagaatattataaacatgattaattttcaggcagagatttattacataaggatttcagctatgtcaactgaaatgcatcactgtcaaaacaagtatcatggtgaaaatagaatgcgctccgcacttcagatgctgtgctcagaactaaatcaatttaaattgtggctgaagcaaaattatattctccagtgaaaaagagtattctgggcttcttttatttagcttgaagcattcttgttagatcgtgatttagaaaggtagtttaataagactagacgagcactgataatgtttgtgtgctgtttcttctcattttcatgggaaggctaactttctgagatccccacacattccagatgtagccagtgggaatttgaagtgaagagtattggtctgggagtcatggatcatgaattctgagcttcgctctggcctcagtttccttagctgtaaataagtaagtgctaagcaatcctcaaggtctcgtgagcagattgattttatgggtcctagagagtggggttgtctgtaggaagccttgctggcagcctcgcgcggtgcagaagacagaaggaggaatacaacctgagagtaaacaggaaaggccaatctctccatactgcatcctttcttggaaaggtctttagatggtttttattgttgcagaaacttctagaaggggtaatactgttatgacaggccatacctaagactttttcagttctcactaagctatatcagttaacactcagcaagaatcaactagaagtaaattcaggtctctcatccaacacatggagcatggagaaaactgggacaagtggccaagagctccaggtttatgacgagcagtgcctggctctgccacagagcttagggtgagggcagcaagcctaacctgtgcactaagcctaacccacacatactctgctaagaccttcacatgaatttgttcataacctggtatgttaggcaggaatgattacgttaattttagatatgaaaacttgggttaagagaagctaaagcacatgttaaagattactgagcaacctcggggaagccaaggtttaatgtacaggctgtcaaacttgcaacctatgtttagccagccttgcagtggctcagagtcagagcttgggttcctgagagcttcagttccttcctgaagaagcctggttgaagcttcagaacactcttttcagagggacagccatgtccctgggactaaattgctttctggtatgtgttacccactgccgttgcatgtgtctgagatctgccatgctcggtgatacggggtggactgggtgagtgtgagggagttgtagagtttaaaaagaagcctgagtagacgtgatacaggtttcccagatggctgagtaagtaacagagaatacggaaaagatcaaatcacttaaaaccatgagtcatctttttctaaaaatgaacagtttatttactaaatcatgaacacaatatacattttacagataaaatccacaaggccatcaccagaagccatgagagtgactgctccagagagttgacagcctggtagggttaggaggctacttaaaggcacatggaacttggcctttctagggtagtcagtgagtagacacgaagggaaagcctccagtagtaaatgggagaatgtctgaaaagacctgtggttccctcagaagtagcagaaggcagaggttagagcagtgcactgagactctttaagagtctgcccactaagctgggctctggatttcagcttgaaggcaaggaaataactctgaggacttttgagtaggagactggtttgaggaaatacaataaatcttgtggtgatggtcagaatcccaggagacaagtggtaccagtagaagaagggacagtgtaggtaattatatttatttatttatttatagtctaaaatcctttcaagtgaatagtgacaaaaatagtatgcatttatcagatttcagacagtgctaggtggtacattgtcaagttgaggagttaaatgtgaagttcaggaccacacagatggtcgatggcctcacaggttttgagccacagtgttcctgactcatatgtcctgtccatggtgaaattctgcttgttcctcatctccagaactcctgggtactaaagtcatgggttagggtgtttcaaaaatggaaaagaagctgcaactaagagatctatcacatatccttagttttttttctgattcttcatgcattttatgctcaggattgggaaatggggcgacaatagtttgttttcaccaagaagtgccctggtctcactgacacccagcagtcacattctgttgggctatgagctgttttgttgtgctttctcaagatagagggtgatctgccttccaggtactttcctacctctctcattgactgtggcataatattggttgtgcttatttatatactaaggtagcataagtttagaagacaaaaataacaaaaattactttgtaaattcatagtaattaccacacaattgcatgcttattcaccacagtaaaatccagtgtgtttgtacttcacatccatgtgcaaagtccggctcctgggccttcactatgaaggcaggtgtattacacagcccggcatggtgaaatctagccagctgggctggagctactcttaactgcctcttttcaccacaatgttgtacaacatgacagcggttatgtactgcacattaaaaaagaaaaaacaacagaagaaagaacttttgaacatttttaccacaaagaagtgatgtttggggagattttaaaaatgcttaatttgatttaaatactgtaaaatgcatacatgtatcaaacatttcatggtaccccactgataagcaaaatgtctatgttttatgtttttgtatgtctcttaaaaataaaaatgtcgccaggcagtggtggcgcacgcctttaatcccagcacttgggaggcagaggcaggtggatttctgagttcgaggccagcctggtctacagagtgagttccaggacagccagggctacacagagaaaccctgtctcaaaaaaccaaaataaattaaaatataaataaattaataaataaaaataataaaaaaaaaaccctcttagtcagtacagatgggacaatcctaatgacttaaattgctttagcctttgagggcctaacatttgttaggggaaaagcaaccttatcaatggtactgacaggaatgtttgacatgtagggtttgatataaatgtgactggaaagtcacatggaagggagacagacatgttacaaaagatgactgtagagtctagacatatgtgccaaagagggagaggaagagggagcagggagaaagactgtggatggcttacacaagaataatgatttctctgatgggcactcatcagctcagtccctcagagcctgagatctgcctacagatctccaagaacaccaaagccagctatttcttttgacctctcctgtttcaagtcattgcagaagtctaagcacctgtggtacccctaagttaaagccctgggccaggaacgttcctcttttaccagtcatggttctgtatgcaggcctcctaaccccagttatctcacagaaacagctgactgtccgagacaaatagaacatgtcataagtggtgtgctgcaaagctgctagcaccttatcctttactttgtgtagattaagttttaaatgttttaggaaatatacaagcaaaactctctgagcctactctagccagtcgctgggccagctccaactgacaggtgtgcaaaccgaagtgaggggcatgaaaagttcagggctacttgggaagaagcaggaggtcacagcgaggaaaagggatgagaataggtgacacagttgaaatctatcatgtacatgtatgaaaataccacagtgaaacccatttatatgtataactaacatctgctaataaaaaaaaaacatttaaaaatagcagtttcccaacagaaaatgtagttggttccaaaattggctccctggaggaaaggaagttttggaaacactaatgtgacttacttctgtaaagcacattatggtaagggagtgctacttgctagcactatcaatagaatgttggtaatgtgttggttggctttacgataataactatatgacagggggattatttagcttatagtttggaggttccactcctaggtggactggcccattaccttggacatctggtgggggtgacagattgcaatgatagaaagttcatagtagaaaaaaactacttacattatgacccacagagtgcaatagagactaaaatagacaaagaaccttacaataccttttgaggtattcaatgacctaagggtcttccacagaatactaccttctaatggtttcctcatcttttaacatgtgacctttaggaaatagcatccaaaatgcaatagcagagacccttgatctgaggtgatgaagactgtggcttatctatgtgacctttctctttcaaaaacatactactccagtccaatcatgagataaacatcagggaaaaataggaattttaagaaattactaaccactactcctcaaaatcatcatgttcatcaaaaacatgggaatctgaaaaactgtgaaagccccgaggaacatgaaaaattgaatataataggaacataaggactgaatataatatgacactgaatatgagaagggatcctgaaacaggaaagaggaaatggggaaactctaatgaaattcaaataaagtatcaatttaaggtaggtaatagcagtgtagcagtttgggtccctagttatgacaaatgttccaaagcaatgtaatatattaatagcagtgcaactgtggtaggataaacacttctgtgttatctagtaatttttctgtgaatctacaactgtaaagttaaaatttgatttaaaatgttttagagtctaactttcagttgtggcttctctaggcaccagaaaccagtcgctatgcagtgatgtccacccagctgaagcatgacaatctctcactaatcttctattacgtttttctccagatgtgtaaggcccatggcattggctatgaccttgaggtatgagggttatagttatagttcattagggctggacccatcaggtatgagcaggactcagtggttgataaactgctactccttcacagagatgttctttaagattgggtgggtgtattcaaaaggtttgatattgtacaggacagaaacctgtacaacaggggcaagacttagtctggaaagttctctcagacttgcacaacctcatactagagcactagccctggttaccaggtttagaagtaccctggaagcctatccactgatgcttgctaagaaacagtctcttggttttctcaagtagaacacaaagtactgtttcctcacaattggagggtggaagtccaagatcaggccactggtggatttggcttctggtaagggacctatttgcttatctgtagactactgtctttatcttatgtccataacacacacacacacacacacacacacacacacacacacggggtggggggggagacagagagacagactcagcaaacacactctgcactctgacacacacacaatctctggtattctagggtgttctcagacactacatgactcagtgcctacttgagcaaacccaacatatcacaacaatataaaaacaaattcattgcccacatgtaatctctctcttcctctccctctctcattctctcaccatgggaggtgaagccttttgtataaggacaccagttctaaaggatcagggctctactcttatgacattatttaactagtcacctccttaaaggccctatttctaatatagtcacttaagtgttttgtttgaaatacaaactaaggaacatcaaaacaaaatccttatcattttgctgtttatatatgataatttcatttaagaaggatttctgattatttttaaagatggggcagtatccccatttttgcccctgtgcagctgctccaccctaacttagcttcataagccatatgaaatacaaagctattcctaaaccaggacctccagtttgtatccagcaactcatgttactctggcgaaataatttcctatctttgcacttggatacatattttcaaacttctgacataccaggatgttctaagacactatgtgacacagtatctatttgagcaaacaccacatatcacatcaacaacataaaaataaattcactgcccacaaataatggcatgataattatacagttgcaacttaactgaatgttttgatttgtaaagatataatttaatacatattaattttaggcaagcagtctgccactgagccacattaacagtcttaatgtatatgaattttcagttttattacttgagaaccaatactgttttcaagagtcaactcttggttgtagtattaattcaagttttgactagaaccatgggggtgaccaaagagctcttacaaatggatctgtacgcactgctaggcattgaggagaaggcggcagacaaagaggtgaagaaggcgtacaggcaaaaagcactgtcctgccacccagacaaaaatccagataaccccagagcagctgaactcttccaccagctgtcccaggccttggaagtgctgacagatgctgcagccagggctgcgtatgacaaggttaggaaagccaagaagcaggcagcagagaggacccagagacttgacaaggacaggaagaaagtgaaacttgacctggaggccagggagcggcaggcccaggcccaggggagtgaggaagaggaggagagcaggagcgctacccactagagcaggaggttgctcgacttcgagaagagggttcccgtcagttggaagagcagcagaggctgatccaggagctgatccgccaggaccgagaacagaggctgagaggaagaacggaaaatactgaaggcaaaggaaccccaaactaaagctaaagtggaagggcaagaaggaggatgagtcccaaggtggctattccagagatgtcctcctgaggcttttacagaagtttggggaggttctcaacctggtactttccagaaagaaggcaggcaatgccatagtggagtttgcaactgtcagagctgcggagctggctgtcagaaatgaagtgggcctggctgacaaccctctgaaggtttcctggttggagggacagtcccagagcacagtggaccccggccccccaggactgtcaaagggctcagtgctgtcagaaagggacgatgagagtctcgtcatgatgcgcatgcgccaagcagctgatcgccagcagctgatcatccagatgcagcaggaagatgaggggcggcccacgtagccccagctccagccttcccatcccacatcctttctgaatcatcaccaataaactttttaaaaacaaacaaacaaacaaacaaacaaacaaacaaagagtcaactcttttgggccctttaaaaccattcaaacttcaagcacagtatgaattgtgaacagacctgggctgacacttggcaaccccagcaagctggcaaggcactgtcaagatcatgaggaccttcgcttagcctgatctgtgctgctgcacacatatataatggagctgatattgctttgcagattacattaaatctgatgaaatgctgaaagaatgaaaaagcccgaatgaactgatttacctgaaattgttacatctgctacacacaatcccttcagaattagttttttgtcccaaactgatgagactgaaacattcccatgtaccacaaggtagctaatctatttgttttatttttctaaagtgtcaaaacagaatatgttttgtaaatcagcatatttgacagggatgtcgcaaagcccaaaaacaaaacatactttatcactttctactacctgaaatgtgtttattcttgaattaaaggctttgcacttgactaagtgttataataattttgagaaaaagtaaagcccagtaggagttatttacacctttgtttcttgagtgatcggatacacttctttttcttttctttttaaattcagtctctgtagagactgtaaaaaattgccaattgctgagtgtactgcaagttgtcacggcagggtattgggaaaagtttttaattagcaataattgtgcctaggataaacctcattagctatgatactacaactaagagcagattttacagggaaaacgtgttgctatggtccaggggagcagacacattgtgcagaggaaggtgatccagcaacggtcagtagccttgctagggaaagctatggaaagaatgaatagagaggtaccacagacagccatcacggttccccagactcacctgcaggtttgctcatgttcaataacttaaaaaggatgaacgagtgaagtgaaatatggattggggcagcagattaatggaacaacacaaagaagaaaaacagaactagaagcaaaggagatataaaagaacccatctgaagaaagcagagaggataaccagaaagaaagcaaaaacataaatatttatgaatctataaatatattacatatataaatatataaagataaatgtatcatatgtacacatacacatatatatggattaggggcaacacacaatatatatttgtgtgtgtgtgtgtgtgtgtgtgtgtcagagagagagagagagagagaggagagagagagagaaacaagcacagagacagaaagagagagcgactgctgaaggaagagagaatcatctgaccaggttggtattttacaaatttcccaggtgcattattgcctgatttttttctgaagtgggctctcatatttcttgactttaaacattaatgcagaaatatatccctagtaagaactttctaccaccattcctcttcctcctcttcttttccttcccctttactccccaccccctcaatttttgattttctgagacaaaaaaatgtcttgctctgaagcttagtttggtcttaaattcatggcgatcttcctgctttgcctgcttcttcctggactacaggtgttcttcatgacttctctcaggatgggaaatagatggtggggcagccctgtagagcacttaccgtgtgctggccacatgagtgttttcactccaccatctcatttcttctgcatgcccatgttgtaaggaggtactgtttccactataccacagtgagattttcccatggttaggcagccaagaatgttatggagctgtagacagctttctcccatgagtatcttttccttttaagaactgctttcctttaactaaaatatgattccagactaatgaaagaattctgaaatccatttcaaaaatgtgttctgtctcagtgcctcagctgcagaagcaagctcttctgcacaatccctgtgcctgcctctaccttacaaagggggttgtgtttaatattggcttcctaggatctcgttatctctttagcttatactgagaataaaaagaaagccatttacctaaatccaagtgtaacctgtgctatctgtttttgcttttggttgaatttaaagtgggtgcttttcccaggaaaagcaagcctcataaacaatatattattgttgatgttggatcaaaggaggactcctcttatgtcctcattcaacttggttttcttcccattatcatcacagaatttcagtagtgcttttgtttttgtttttgtccaaaattgagtgtggggagagtcagattaccctatgagagtattttttcttgatgaatattagagagctgtgttgctgagtttgtaggtagcttggtgggattcattcttggtatttctgtaatgctacagaatgccctaaccagtttcttaatgaaatgaagttgtaactcaagctatatgaagacaggcatcacatttattttctgcaacagtgtgaagggggctggtatattaaccacatcttggtagaggccccattcccaggactagatggtcaatataaaatgaactttatactttatagactttttgtcttattttgcttagtttaggcacttttgtcttatcagtctttgttcatttgttgttttgttcaagacagagtttctctgtgtaataaatagccttggttgtcctggactcactttgtagactacactggcctcgaatttatgtagatctgcctgtctctgcctctcgagttctgggattaaaggcatgtgccaccatgcctggctgtctgtcttatcagtcctttgcttgtctattttgattttcatttttgtgggggttttggtgtttgttttcttgtttttagtatgtttatttttcttttgtttttgtctgcttttttttgtttgtttgttttattttttgttttttcgagacatggtttctctgtatagccctggctgtcctggaactcactttgtagaccaggctggcctcgaactcagaaatccacctgcctctgcctcccgagtgctaggattaaaggtgtgtgccaccacacctggctttttgtctgctttttaaagagagagagaaaaatgggaacacaatgttgggtgggtaggaaagtggggggactggaaagggaaaaagcatggtcaaaatatattgcataaaatgtctttcaataaaaaggtaaatcaacttaaaaatgtttagtgccaacatgtaaatatgaaatgcaaatcaaaaggaccctgagattccaccttataccagtcagaatggctaagatcaaaacctcaggtgacaacacatgttggagaggatgaggagaaagaggaacattcctccattgttggtgggattgcaaactggtacaaccactctggaaatcaatctggaggttcctcagaaaattggaaatagatctacctgaagacccagctataccactcctgggaatatacccaaaagatgccccaccatgccacagaggcaactgtttctctatgttcatagcagccttatttgtgatagccagaagctggaaacaacctagatgtcccacaacagaatggatacagaaaatgtggttcatttacacaatggaatgctactcagctattaagaacaaggacatcttgacttttgcaggcaaatggatagaactaaaaaatattatcctgagtgaggtaactcagacacaaaagaacatccatggtatgtacttactaatatctcagtagttttatgctgattatgttgagataaaatattttaatactttggatttatgaatgtatatattaaaataaatatattgctttgcctactttttcacatttaaaaactacagtgaggcaaataaatgtaaatgatctctgtggctgacatattttactggacaattctagggctctattattattaacatgagtatagcaaatcacttcaaatcagtggtttttacttcagaattttatttctcccttttgttcaaataagtccatgtcacctagcatgtaattcccaatcagaaaatgttcataggcttctcaatccaagattttgtgggatatttattgatgtttatccttttttctgggaattaatacttaggcaacagagcttgtcttccatgctttaaaagattgatttaatcattgtttaccttttgtgggtcctatttatcaaccatcagttctactaagcagcaatcagacagaagatggtttgttttgttcttatctattttgaagattttatctttcttttgatcttcaaaactaaaagaagtttccaggtgtggttattcttaaatgtatctttatcatttgtagctgtttgtggaatgtgtaatttgatattgtattagttagggttttactgctgtgaaaagacaccacgacaaaggcaagtcttaataaaacaacatttaattgggtctggcttacagattcagaggttcagtccattatcatcaaggtgggtgcatggcagcatccaggcaagcatggtgcaggtagagctgagagttctacttcttcatccaaaggctgctagtggaagactgacttccaggcacctaggatcttatacccgcacccacagtgacacacccattccaaccaggtcacacctattccatcaaggccacaccttcagatggtgccactccctggtccaaggatatacaaaccatcacagatataattcaccacttttggaaaattatgtcagtatttattttaaaagtttcctcccctcttgagatactaaatatatgcatgctatagccttttgttccattttccacatatctccagtccctttctgtgtgaggactgacaccctaggctatcctctgaggtgcactggcacttactggtgtgtacacacactgacaccttgggctatcctctgaggtgcaccggcacttactggtgtgtacacacacagcataaagcaactgcacagctccagtgtccctctgctacactcactgcatccacacttctctcttcacacggccaggggtttgctgtttgttttcttgtttctgtgctcctctcattctctcaattgtagttgtcttaggcctttcagactttagttggagagcgataacctttgtctgtttttattgagttaatctttctttattaaaacatttgctagactatgatctttgctgcaatcttactataagatccattcagaggttttagtaattggttgtattcataaatttaatttgatcattattacaaggctgaattttactcttttgtatttggtgtattttgcccatgtgtaaagttcaaggaaaactctgtggtgtttgttgtctccttccacggttccaagggtcaggagatcaaactcaagctgtcaggcctgtgtggcatgcaccagttgagccattttgccagcccctttcaatatatttttataccttcttttagaaatgtaaaaacttagtttttccagcttttccaagttcctactttctacaatctgtttattttcatttctgctacatacttcctgatacatttagaggctcaaaatttttgtattctttgacagagcagtcaagaatggtcaacattcaaacagcattgattttctaactgcttccttagtgatgtggacactttaggacttctaagttgtcacagatgccagttttgctaaatatttcatcatctcccatgatttttgagacacctatttccatgaatagctttcatgtcactgattgccaccaagtcaatatcaagcttgtaggttttgcttggggacacctttcccttgatgctaatttctgtgccaatgaggtagggtggctatgcttcagtatttgagaaacaattgctgtttctaacaccagaaactgtgtttcttgttcatgttcttcttccatatggatggcatgtgtctctgatcactcttagtaccctctgaaaccagactgttagaataagctgttggaatgatcgtctgggctttcccaaggtagggaagaatatgacaactcaaatgttctgcacagacgctgacatatctcacctctgctcatatctcacccgtcaaaacaatttacatggctagcctaacttgggggaagcagtgaggaagtgtagctctgttatgtgcctggaaaggggagaaccagagtatctgtaaacagtgctaatgcttcccaccatggcaatatctaggccagagaaaatgagtgttgctggttagagggctatataagatcttggcacactgcctgtgtatgtgtgataccagcccccttcacactgttgcagaaaataaatgtgatgcctgtcttcatatggcttgagttacaacttcatttcattaagaaactggttagggcattctgtagcattacagaaataccaagaatgaatcccaccaagctacctacaaactcagcaacacagctctctaatattcatcaagaaaaaatactctcatagggtaacctgactctccccacactcaattttggacaaaaacaaaaacaaaagcaccactgaaattctgtgatgataatggaaagaaaaccaagttgaatgaggacataagaggagtcctcctttgatccaacatcaacaataatatattgtttatgaggcttacttttcctgggaaaagcacccactttaaattcaaccaaaagcaaaaacagatagcacaggttacactttggaaatgtttcctttgccagctgctatgaattgcagataccttcttagttagggatggatgtccactcgcctttcctggtgttgggaccctgtctagcatgacctgtgcaggccatatgcttgctgccagtctctaagttcatatgtgcatcactccagttgtgtgcttcattggtgtcatccagcgcctctggctcttatgatcttcccctcctcctcttccacatagctccctgagatattaggggagggctttgacgaagacacatttaggattgactggctccaagtctgtcactctgcacattgtccatttgtaggtcccttgtctagttcccacccactgcaagatgcttctctgatatggcatagtaaggcacagttctgtggatttatcagtatgttcccaggagtcattgtattgctatattcctttagtggaattcctttagtggttttcctaagcatatgacctatctagactcaggttcttggccattttactagaatcagttccatttcatggactggaatcaaaaagcgattggtttactcccataacatttgtgccattattttaccagtatattttgtggataggtcactgctagagttcacagggattgtagctgagagctattacttctctccagccgtagtatgcagtagaaactttagctgggctgaagcttctggttaggtaccagcttgacttctccatgtttgatgacatgcaagtgttgtcttcagcaataggacctcaccatcaggttgtagtaaaccaatagacttggcaatagcctgtgatgtttggaagtttccatgggctatctgtggccaatgtaacctattccgggcactggaggttttacttggtagcataagagtttagttggggcattgtcttcacctattactttgtgactccatttaggttcttcttatctatgtatatattttaggaagcttctacagtagtaggttttcatatggcttttcacatggcctttagtgtcaattgacccttctcatatccctttctttacctttctcttctatccctcacactgtttaattcttctgttgcagtctcccactgtctctctaaaactacatattcattttctctttccttagtagattctccccttgccccttactctctaactcctgtggttaaacagattatagcacgcctatcaaaggcttaaaagctaacatctacgtatatgagaatacatagcatatttgtgttttaaaatctgagttatctcagtcacaatatttttctagcttcatctatttatcttgtgaatttcatttttattaacagatgactaatattccactgtgtaaatgtgctatattttcattatgctttcatgagttgatgaacatttaagctgtttcctagtttctggctattatgaatataatagcaataaacatgattgagcaagtgtattagtgagggttctttagagtcacagcaaatgtctctttagtagcatgtagaattctttgggtatatgctcaagagtatatatctgcatttggacgtagaccaattcccaacatcataagaaactaccacactgatttccatagtgttatacaagtttgcactcccactaggaatgaataattgttccctcctccctgttctcactagcatatgttatcatttggtttactcactttggccattctgactggtataagagaaaatctcaaagtagctttaatttgcatttccctgatgaccaaggatgttgaacatttctataagtgtttctgagccattgtgtctcacattttgagaacttttacttagttctgaactccatttttatattgggttatttgggtttttttagttcaggtttttaaaaaattctttacattttagataaagcctctatcagatatatgattgtaaatgaagtattcttataaatataagctgaattaatccaacgtttgtatttctttaatttatgccagtcctcaaaaaccaaatacataaacattaagatttacttaaaactgcacctcaatagctgaacagttaaatgatctaccttaactttctatgctaatctggctacccccgagccccatcccacaatacttgcatattattattgatctagtccttcagaccccttctttacagctccaattcctccatcctccctgctgatctgaatctcgtctctcctcctctccttcctctaatggatgcatgtccctccctattctctattctgcccagggtgattagcatttattgacaaagtagaaaataaatggtaagaattatttacataaacttgacacgacacaggaaatgcattacaatgccatatctggattgaaacaagctatgaggttggagaaatcagcatttgaataacacaagagtaaactttacactgtatataaaaacattatgcctacatatgattaggaaagatcttttcctattctgtaggctgcaaatgatcttgtcctttgtcatacagcttgatgaggtctcatttattaattgttggtcttacaacctatcctacccatgccatgttcagaaagtatctttctttgctgataaattcagccctattccccactttgtcttttaccacattcagggcataggtcatatgatgatnnnnnnnnnnnnnnnnnnnnnnnnnnnnnnnnnnnnnnnnnnnnnnnnnnnnnnnnnnnnnnnnnnnnnnnnnnnnnnnnnnnnnnnnnnnnnnnnnnnnnnnnnnnnnnnnnnnnnnnnnnnnnnnnnnnnnnnnnnnnnnnnnnnnnnnnnnnnnnnnnnnnnnnnnnnnnnnnnnnnnnnnnnnnnnnnnnnnnnnnnnnnnnnnnnnnnnnnnnnnnnnnnnnnnnnnnnnnnnnnnnnnnnnnnnnnnnnnnnnnnnnnnnnnnnnnnnnnnnnnnnnnnnnnnnnnnnnnnnnnnnnnnnnnnnnnnnnnnnnnnnnnnnnnnnnnnnnnnnnnnnnnnnnnnnnnnnnnnnnnnnnnnnnnnnnnnnnnnnnnnnnnnnnnnnnnnnnnnnnnnnnnnnnnnnnnnnnnnnnnnnnnnnnnnnnnnnnnnnnnnnnnnnnnnnnnnnnnnnnnnnnnnnnnnnnnnnnntggaattgagttttgtacaagatgataaatatttgcattcttctacatgcagccataagccagaacccatttgttgaagatgctgtcttttctctaatgtgtatttttttttacttgtcaaaaatcttgtgtgttgatgtgtgatctgggtcttcaattctagtctatcgatgaacatgtgtgtttaaaatatcagtaaccatgctgtttttattattatagctatagtacaacttgagatctgggatggtgatacctccagctgttcgtttattattcagaattgttttagctattatggcattgtatttacatatgaatataaaatttatcctttcaatttctgtaaagaattgtattgaaattttatggggattgtgttgaatctatagattgctgttggtaggatggctatttgcactgtattaattgtatagccatgagggtggcagatcttcccatcttctggtgtctttcaatttctttaatatcttaaaggttttattatacaagactttcatttgcttggttagaactatccctgaggtttttttgttgttgttttggtggggctattttgaaaggtactgtttccctgatttctttctcagtctattatttgtatattgaaggctactggcttttgtgtgttaattttgtatcttgctaccttgctcaaagtgtttatcagatgtagatgttttctggtggagttttccaggtctttttgtataaaaatcattttacctgcaaataaaaatattttgacttcttcctttcctatttgtatccccttggggtccttcacctgtattctagctaagccttaagtactatattgagtaagtaggtcatccttccttgtcttgctcagactgtagtggaaatacttcaagtttcctcctgcttaagttgatgttggctatgggcttactgtaaattgttcttactgaggtgtgtcccttctaccctagtttctccaggacttttataatggagagatgttggattttgtcaaaggcctttatctgaatctaatgagataatcatctggttttcattgttcagtctgtttaatttatatatgtcgaactagtcctgcatttctggagtgaaaccagcttcatcatggtgagcaattttttaatgtgttcttggattgagtttgaaagtattttattgagaatttttgcatccatattcatatggaatattggtttataattttcttttattgttgggtctttgtatggttttggtatcagaacaataatggtctcataagaattaggaaaggtgccttcagtttatattttgtgaaataatttaagaggtattggcattaattctcctttgaatatttaggagaatgctgcaataaatatgtctggccttggagttgttcactgatttgtttgtttgttttgattaggaaacttttaattactactttctatttcatttaggggctatgggtctgtttaaattgctaaattgatcttaatttaaccttggtatgttatatatgtcaaaacagtcactggtgtaagttttccagtttggggaatttcttctctagttctgtcattttgctgttctatatacttcttttaccttataggtacctctttctttagactaggagaatttttctatgtactttaaaaaatattttccatgtcttggctttctttctcctttatccttataattcatagattttgtcttttcatagtgtcccatatttcctgaatgttttgtgcctagactgtcttttaggtttaactttctttttttaaagatttatttattttatgtgtatgagtacactgttgctctcttagacgtgccagaagagggcactggatcccattacagatggttgtgagccatcatgtggttgctaggaattgaactcaggacctctgtaaaagcagtcagtgctcttaaccactgagccatctctccagccccaactttttttttaatagagctatttatttatttttttaaccttaccttcaacactcaggattctttcttctatctcatagtctcctggtaaggcttaccactgagggttttgtttgacttcctacaattctcatttacagttttgggttttctttaatgataccatttttctgttttactttcattatttcattgaactgtttgtgttttcacagacttcattaagggatttattcatatcctctttaaggtccttgaacatattcataattgctatcttgaagtcaaactgtgtattttatatttctttttactgtttgttcttcttctctatagatctgcataagagtaatcactaataaccacaggacatagtcaatatttgattgtcttgaaatctcctctgccagtgatattagtccagaactcttcaatttagcctccaacagattttttcttttcttttcttttcttttcttttcttttcttttcttttcctttcctttcttttctctcttccttccttccttcctctctctttccttctttctttttagtgtgtgtgtgtgtgtgtgtgtgtgtgtttgtgtgtgtgtgtgtgtgtgtgtgtgtaacaagggcagaaagaagccttttttttaaccaaaacatcacaagaggtctctagctcagttactaattttgttccccccaaaaacctcttaagttgggcctccacagttcacattgctctcagccctactgtcttccacattcttattaggatggctgttaagccctatttatggcattcaacaattttccttatctaaagtcccaaagttcacattcttccaacaacccacatggtaaggcctgccactgcaatacaccactccctggtaccaacttcttttcttccttagttactgttctatcgctacaaagagatcccatgaccaaggcaacacttaaaaaagaaaatatttaattgagggcttgcttacagtttgagagagtgagtccatgaccaccatagagggaagcacagcagtgggcaggcatggtgctgggagcaataactgagagcttagatctgatccacacgcaggaagcagagagagagagagagaggagagagagagagagagagagagagagagagagannnnnnnnnnnnnnnnnnnnnnnnnnnnnnnnnnnnnnnnnnnnnnnnnnnnnnnnnnnnnnnnnnnnnnnnnnnnnnnnnnnnnnnnnnnnnnnnnnnnnnnnnnnnnnnnnnnnnnnnnnnnnnnnnnnnnnnnnnnnnnnnnnnnnnnnnnnnnnnnnnnnnnnnnnnnnnnnnnnnnnnnnnnnnnnnnnnnnnnnnnnnnnnnnnnnnnnnnnnnnnnnnnnnnnnnnnnnnnnnnnnnnnnnnnnnnnnnnnnnnnnnnnnnnnnnnnagggagagagggagagagagggagagggagagaggagagagagctcaaatcccatccctggtgatataactcccccaaccaggtcatacttcctaatccttcccaaaagagctccaaaaacttagaaccaaacatatgagcctatggggaccattctccttcaaaccaacacagatagtattttaaaccatcacttacagagctataaaacctatgtgataaagcagtagggtatgctatacactgaaactcagattcgtttgtgtatatatgtgcacacatgttcatgtgtgtgcgtacaggtactacatgtacatgtgtggctatgtgcccgtgatggtcaaaggacagacaaccttgtctgtcattcctcagtttcccactaacctggagctcaccaattaggctaggcaggctgcttagccagcaagccccagggattaacttgcctctataccaatgctagggtcattaatgtgctccttcaaccagcttttataatatgtgagttcttgatataaacctttgatcttcatgcttgtaaaataggcacttaaccacttgagctatctccctcaccctcaaattcttttacacacacacacacatacacacacacaaacacaactctgtctctgtctctgtctctctctctctctctctctctatatatatatatatatatatatatatatatatatatgtgtgtgtgtgtgtgtgtgtgtatacctgtttttcaatttttgatgtaataaatcagctaagaaggacctaaaaggcaaagtccaaggattctgagcttagataatgtctgtgaagatcctgtcttaatagatgcaatagatgattctaatttaagcgttgtaagaaacatactaaataaaagtaccacactagagcatactgtctcccttttctgggggcagcccctttatatggtacttaatggtagctctagatttcaattcttatcaatcttgttacctgtgttgcattatattgtctttgtttcctatataaataagctatttgttttcttctcactgaaaccttacaggacagacaaggaactgtttttatattatatgaatctctgaagagatacaagttgggcatgttgtaagtatgaagtatgtctataagttgtaataagctttaaaatgtctttatcaaccaataagattggctcttgtcttgaattttactcagcatgcttatttatcagaagtctatcttattttatttagagcctcaagtactttacaaagtgcctgtagatgttggtgacaagtttctaaatctagttatccacaattatgaggtaggaatctacatttaacataagcttacacacatataaggctcaaatcttattcatagggagctagttcagatgatccagttgtgaaaagctagttgtcattctggcatacttagaataataatctggtgacctgggcagatgttcttccaaaaggtagggctggagccagtttgtgtgtggatgcgatcttctcggagaatgtgtatgctgaacagagtcctcatagtaaagccattcacccctattgatgcttctgcatgtggaaatgctctttcttcccctttggagatagaatgtggctgcagtttaatctagtgctgtgataccagaaatgaaacctctatttataatatccacataaacatgcattcatttcatctgccctggttttatatctttttagaatggggctaagaaaggagctgccgtctgctccccagtgatatcctatccttcagctgcttccttgctctgaacactaaccttgatgtttacattctacagatgtgccagtgtgatgctagggcagaagcaatgaaaaaaggcaatttctgtgactaggcaaacaaagtggccaattggatttgatgttggcaagctaattttaaaaattagtattttccacagtaggaatctaattaaatgggagagatgcaagctccaagtacaaaagttcaggaacatacaagaactaaaaatcagaatacagagatatgcactctcactgtccaccagctggcatgaacgatgaattacaaagggcaaggtgccctcaggctacaaccaaataagccctcatgcacacaggacaagatggcaggccaaacccagacctaggattcaggtggatagaaacaggtcatctgaggcaaccagctcacatcattaggaaaatttcaaccacaaagagtaaacagacaatctgaaaagcataaggggggagggggtcttgagctgcatcccagcttcagctgcagaaatgatcctatcagtgtacttcctagaaagtcactgctactcacacattctactgaaaagacaccattggcacagacttcagattctctgccttttctgctatgttgtatgccccttcattttctcatcccttactacaatcaggagctagagaatgttagagcagaatggaacttggtaattgttataggtcagaaacaggcttagagaagagatgtgacttgcctgggtcccaaagcagatctctatctatccagtgatcctcaccatatatcttgttcactaaagttatagtaagtggcatctttgcagatagaacttagttatgttattgttattggactttcgtgcattaagatacttaattgtttgtaagaattgctgatttactttttctgaatattagacacaattgaagatgtccttgaattctcacttgtgtctacctaaatgaaggggtagactgacagctacacaaaaggaattgcactaagctgtgaatacagacagttaaggatagggtattcagaaggaagtgtccagatgatggtctccttttatacaattatacagaaaaaaagataatccttaattttctccaggaccttaataaaggctttttaggagatggctgggctttgtttggcattactgaaatcatgtcatgccaggtatagagcacaagtcagccacccttttaggaaaaatgggagacacttcaagaggagacagctctacagagcagacatgtggtttggcttttctgaaaaaacttcaccacaactccatttattctaagatagtatctggaagatacagataaaggagaaattccaaggaaggggaatatggagaaaattctcaaaatttgaaagaaggcatttaactattttagacaaaatatcatacattcacacacatacctacaattttttaaatggatctcatgtatacatgaaaactgctaagaagcttagtgaagacatacattcttagctgcccaaccccagatcttggcttgaaatctgttgccctaagaacccagggtcttacactaattctggtaagagaatacaaataacttttaaaaattactcagtctggagttgattttgatatgatttatttctttgtttgtagaacccactatgtaacatgaccaggccagcctggaactcagagatctgtctgtctctgcctcccagtgtcaagattaaaggcatgtgaaactactccaggcttatttgacttcttataagaaatgtattttctaatgattgttcatagaaggggtaggcctgtccatgtatttgggaaatgtaactcaaaaagctcagaatcactgttttagttcaagtcattcattggtagaaaaaggagatgaagacccagagttaagtagcttccacaaagttagccggtggcaagacagaacaaacaaacagcaaaaacaaaaacatctgaactccagttttaggaacctgaggctttggttttagggcttgttttcagtgatgacgatagatgtagtctcctccaatatcttcatttttgcagttgacctaaggttcatctcctttaagtgttatctcccttaggaagtaacactaaaaattaatccactcatgccaggcattgtggtgcatgcctttaatccctggccatggcaggcagatctctgtgagttctagtgcagccagggctatataatgagactctatataataataataataataataataataataataataataacaacaacaacaacaacaacaacaacccatacacttaaccagttttgttttccctttgataaggtctaaaaaatagctagaaagctctctgaattttttcacattaaagcacacaataatctacttgtttgacatgttctctggccttggtataaatggtatagaataacagcagctgttcatgaatgggaacatgtgtctttgaacatgagctactcacaagtagcagaaattacttgttcacatgaaatagaaaataaaactcaaacatgcttccagaaaccagagatgctaaatgtacaacatttagcaatgattcttttcaaaatcagcactgctgtcctaacttagtagtagccttttactagaaatgactgaacctattgccatattctgctaagttgattaataaaaaatatttattacacaaatcctttctgttgacaagttaaaatggagtctcatctttcatatctccctgaagattgccaccttgtgagattgaaaatactcattaaattccatcaccagccacacaaatgagagggcgattgtttttaagcatgtgaggagaatcgctggtaaactcatttgtttggatatcattaacagaacaatcggtgtggatctccagggggtcctcatgacctttgctcgcaatctcttcatcatccatcaagaaatatcagcacctgatatgcaaggcgagaccaattttaaggtgaggtgttaattaactaacgatcctggttaatttctatacaagggctgaaaatacctcatgctgtattgtaaacaagtgctaaaccatctcttttttccttataagcagtacatattttacaatgagcagggtcaattttgtaaggttccaactgaacccgttagttaaatttaatagtttgaaactttttctttgaaatatagtagacttgctttgactcactgccattttgaaagccaggctcatgagacaacagggctctctgatgttggaggtgaaactaaaacgtcacaatggaaccaaaatctagactgtaactaatttatgatgtacttacttgtacttcacataatgcatgtctggttagtgattccaggggagcctagcttctaaaaccagactctcagacccaagaatagtgtgtgttaacgagaagcagaacaaaactcctaacatctatgtgggatatccacccaccccatttctccacagtgaggtggtccttcaccattaacccttttaagtctccatgtggcctctaaagatccaaaatctcccaagttctagaatgcaggagacaactgctgaaaagagctgatggcctgtcctgatacaactcccagcctaggcctctgccttgtttaaatgaatcacatatatctaaggactcaaatgggaaatcatacgttgtttttctcttaaatagaaatctcaagtaaaacttcattgttttttttttacttaagttagcatttagcccctttaattataatgtgtcactcttcaaaatgatttaagacctaagacactgatcactggtttttgtacaccatgactgagaagattgacatgaattaattaattaataatttattttttctaaaatgaacaaattagagcaaactggtgcttctgaactttcacactgcaaagtgcaaggacaagcccaccctttctaactactgactaccagtatctctctttttttttttttttttgaaaccaagtaatagtcaaagtcaatttgaacttaagagtcgctaattttgcaaagtcatttgtgtttctttaccagtgtctacactagactttcatattcctgagacaacagattcctgggctctacccaaattaacaaaaccagaatctttgggttggggcagtggggtctacaaatgtgtctccctatgcaaggcccagtgtttcaccaatgctcagttaccaagtgatctgcgatggtttgattcagtttgagtgtatgtcccagtggctcatgtggtagaagcttggtctctagttgcccattatgagaggtggtatgaactagtagggaattcattggggaatcctgtttagaagacatagatgcagttcccaaagaatgctatttagtccttgcaaaagcataagattggcctctccccactttccgggcttcctgactcactaggagatctgttccttttgcgtgagttcccatggtgccatctgctctgatgcagctaagggggtaaaaggctatattgataaaggtatccaatcttggactttcagcccccaaagttggctccaaagctaagtaaactacatatgtatgtatgcataataggatgaaatgggaataacagaaataaacccatactttatgatcaattaatttctaagagtataaagtgattcagtggaagaaaaatagtcttactaatataaggtactggaacaaacaaaacctacaaataataatgttggacttctcttagataccctttccaaaaattacttaagttgggtcaacaaccaaaatttaagagttaaaaccatcaaatgcttagaaggaaacacatgtgtacaactttatgactttgtattagccatggcttattagttgtcatgcttaaagcagaagtggctaaagtaaaaacaaattatttggatttatcaaagaaaacgtagaatatggcaaaacatttgcaaagtatatatttgagaagcttgtagaattgagagtatttagaaatactcttataagacaataatagaaaggcttatgcaagcaaagaactagaatagatatgtcttcaaagtgtgtgtgtgtgtgtagccaatgtatgaataaatgttaaaatcataagtcattaatgaaatgtaaatcaaagccatggcaacatacaatacctagctaaaatggctataatcaaagagaaaagaaataacaaacatttgtaagaattttggaaaaatgggtggggactggaaccttcacatgttgttgtaaaagagtttggtaattccttaataaagtaaatataaaattagcatatgatataataattctattcttatccaagaatatatattcatataaaaatgtgtacattaaggttcattaaagcatgattcataataactaaaaatgtaaacaacccaaatgtacgtcaagtgagaaaatagtgaattccattttattatatggaaaatagtcatataatagactattgtggaatattgttcaacctttttataaaggaatgaatgaagtgctgacagtatgtactacaacatggatgaatgttgaagatattgtgctaagtgaaagaaaccagtcacagaaagataagtactacaacatggatgaatgttgaagatattgtgctaagtgaaagaaaccagtcacagaaagataagtcctatatgattccattatatgaagtgagcaaagcaagccaatccatagacaggagatgagttagtagctgccaggagcttggaaaaagggacgaaagggagaagatgctaacaggcacagggttcctatttggggtgctaaagatgctatggaatacacagtattcatacctactgaattctatattacaaaggaatgtctcatattatgtagacaattccttaacacacataaaggaaaatgggaaggtgtcagttttgttcccagaaaacaatgaaagtaaattctttcagcctactagccccccttttaaagtgttctatccagtacttctcaaattatctactgaaaatctgtttgttttctaacctatgatggattaatactttttattaggtataccaaattgattagaaaaatggagttaaaaaaaagtgtgtaaaatacaaacctaatgatttcatcattagactcataaaattctagtacataaacatttgaattctagctcaatttttaaacttacaagtctaacaaccagtgatgtatggatgggatgggtgccaatgtgtggaactcattttgagtagaattgatctaaactgcactgaactctgaaaagggataaatgtttgaggggtggatgctttaagaagtctttaaagtaataaatattgtttttactgttgtccacagactaccattgatgatattgaaaccattttaggagtaacagaagaaaataaaatgatatttgtaagagaaaaacagagcaaagaggaggaagataacctttatgaacctgttgaaatacactcagaaatagtctgactttggatacctgtctagagcaagaaagaatgtttgctttgcaattagtataaaagtggggaagttagtttgctttgtttgccaagagataaatcagaacaaattgtaatgtaatctttaaaatcttgtttattatgcaacgttattttactcattaaatttaaacctaccggtgttttcggtgtgaatgctaagaaccccttcctcctcccaaagtaaccacgggggggggggggaagtccactactgcatccgcttctctgtaaatttgtaactgtatgagtcactcttgctttcttgcgttttacaagttttctcctgcttccaaaagccacttagcttctgcatttaaaacaccgaataaaccaggatgaccactatttgtcaaagcacagtgtcctcttttcccaaaataaatgacatcagttttaagtgactatcatccattctacagtgtacccagccctattacttgttctcactgtcacacagtaggaaaagccaatgtggagttaactgtggcatcagagtgtgtctaggtggcagtatctgctctgagtttaagactatgtaattggagcccttcgctggaatgagaattcctgttgctagttttctgcatgatacaacagtaggatttttacaactgaagtcaacggtaccttttaaagggcaaatagctaagttaagctgtgctgccactctcagcctgtgcttcataactgtctaaaaacatttctccatctgccaactttactgaaggataaaataggcaaggtacaacaccaaaatcacatacagttttaaagaacaatctttatgtctataacacacattatttaggaaatgaggtgttttgggggtgttttgttttgtttggcctgtggaatttcaatcattttaaaactgcttccgccacaggctaagagtttttgtgataaaattaacatttctctgtgtgtctgcttttgtttagccattgtaggaaatacattaattagccaggtttttgtctgtgctaggtacagtgatgacctctttttcttgccagatctctctaatccatacgagaagcctattgtccaaacacttgacgaataggaagtgctacatgcccgatagagtcactcttctatcgaagccagagcaacataaggtccaggagactcattagttcactggcacagtcatgtcctgagagtaaatgaaaccctctgtctccttatggctctcatctgctctggactttaaaagaaaactgtctccgttttgttcagcacagcagtggatcattcacatggccaaagccctcctcacaaaaccattaaagccatagggaagttccgagtgtggactgtgattagcactgctgagcctggagctgctggcaacagtgtaggagctcactctcctgtaggttttttaaccacatgattggtttctcaaacaataccacttgccttctttgcatatatcctcattttgcaacacaaaacacttaattctaaactcaggccttttcagactcaggcccaccctacagtgataggaagaaggcactctgactaaacagctacaacttcaaaatgaaaggcaaaaatatctgtaaactaaaacaatcatgtcaagtaattaagtagaagacagagaagcagattaaattggtaaaatgctttaattacagaacatttgcaaagaagcatagtccattatctttcagtacatatatgttacaaagatattgtagagctagcaaactaaattcaatttgaacatgtgctaatgtgtgtgtggtgtccaaaagtatccccaaacattgtcaagtgggggtgaactgctgaatttttactggcctgtgtcagtaaaagtaaaatgtgtcgtttttctgctaaacagtagagctgattctgtatgagatatgctattagctattctagctaacgctaaagatctgcactagcaaagtgtatacaccacttaggagagcattattggcgagtgtcttctttaatgtactgcccatctcataccagtaggtcagacaaccatgcagtccactggcatggtcctcctgcccatcagctacttatacttgccacctactgagcatttagtagggctagatacaagctggactagaagctctgtaattctactgcatcttcccagcaaatccgtacagacacttattactactgccctcatcttacatatgggagaaaaaaacccacaagatttagtaagattattatttcaccccatgctttagtgaagtgaaaataaatttgagatttgctcctcttggccatgaattttagcattttgtataaagtagaaagtttcatttcacctgctgcatagtacacaataggtttgctttcctttatagcaaattctactgtgtttcctaaactataggaaaacaagttaacttatgcgcatctcttgataataaaatcaacttgctaaagcagtcctcggaggactgaagcaagggcctggggggggggggcattgtggcccagatacattatagccatgtataacattttcaagtgataaatatacattttttaatttatgtatttacttattttgagataggatttcactatgtagcccttgttggcccagaactcactatatagaccaggctggcttcaaactcactgagatctgtttctcagatcccaagtgctaggagtaaaggcatgtactaccatgccaaacaaactttatttttaaataaaatcactttattctaattatctcacaaacaaaaacattatacagctacattaaggaaaccacttaagtacctgcccagtacccgactctacatctcgtgaatttctttacagtgagaatggttattctgaagcaatggggttttgtggtggtttgagtaagaatggcctcaaacgcagacactattgcattcgccagaaagattttgctgacaggaccctgatatagctgtctcttgtgaggctatgccagtgcctgactaatacagaagtggatgctcatagtcctctactggatggaacacagggcccctaatgaaggaagtagagaaagtacccaaggagctaagggggtctgaaaccctataggaggatcaacaatatgaactaaccagtaccccccagagctgtgtctctagttgcatatgcagcaaaggatggcctaatcagccatcaatgggaggagaggcccttgatcttgcaaagatcgtatgccccagtacaggggaataccagggtcaggaagcaggagtgggtgggttggggagcagggcgtggggagggtataggggactttcaggatagcatttgaaatgtaaaaaaaatatctttttttttttttaatttttttttaaaaagaatggcctccacaggctcgtggagttgaatgcttgggcacccaggattggcactagttggaaggattaggaaatgtggccttgttggaggaagtgtgtcactaggggagggctttaaggtttcaaaagcctatgagaagcccagggtctgtctgtctgtctctgtctctgtctctctctctctgcctatggatcaggatatagtcctcagatactgctctagcatctgcctacatgccaccatgtttcctgacatgatgataatggactaaactgctaaaactgtaagccagatccaactaaatgctttcttcaaaaagagttgcatggtcacattgtctcttcacagcaatagaacactgaccaggggctggtgagatggctcagcaggtaagagcacccgactgttcttccgaaggtccagagttcaaatcccagcaaccacatggtggctcacaaccatccgtaatgagatctgactcccccttctggagtgtctgaagacagctacagtgtacttacatataataataaataaataataaataaatctttaaaaaaaaaaaaaaaaaaaaaaagaacactgaccaggacaattatcatccccccaacctcacatccccctccctttgcaaagcattaagtttgtctctctgatggctattctagtatatttgtaactttttttgtatgacacttacaataaatattaatataacagaaaatatatttgtgaattggcagcatcctaagacatcacaattatgtgaccaaataaataagggagaaagaaaatggtgtcaacagaggtctcctgaggtgtgagatctgtaagactttggtagggaaatgacactaggaaagggttggagtttggaaatagggaagtcacaatgtgaagacttaagaactgagtatgaggtctagaagtagaagggacttctgacaagatggtaagtgactaaggaaaggggtcatttcatctgtgccatcctaagaactataaacatcctgtttttcaagtgtgaaaatatacttcctatcatgagtaatgtattagtgagcatctgatagctttaataattaataaccatttgttttcatctggcacctttcttctaaagagctcaaagctctttgcatttgttatctcattaattctccacattgtccctgtggggaaagtaataagtatcttaacatttaaatgtttatctttcaaaatttctcaagcatacattaattatatttccaaaagtataaatgttcattagttttattttactgttcttctagctttaatgtgcagagctcatttgttcaattcctcaaatgcactaatcatagtcttatttggaaactctaagttggcgagatcatgtggtggtggaagcaagagagagagggagcatttgcttgtcctgttttcccttccaagtgctaaccaggctaggccctgctcatctcccagattagacaagactgggatgctcaggaggggatggccagagcctgcctttgcttttcttactagaaaacatttggttgaatccactgcaggtgcaaacagagtgtgccgaggatcctttccccttcattatatggtattagtgtgctgacagcttagtcttcaggtggaacaattttttaaaatattttttattacatattttcctcaattacctttccaatgctatcccaaaattcccccatacccccccccacttccctacccacccattcccatttttttggccctggcgttcccctgtactggggcatatacagtttgcgtgtccaatgggcctctctttccagtgatggccgactaggccatcttttgatacatatgcagctagagtcaagagctccggggtactggatagttcatgttgttccacctatagggttgcagatccctttagctccttgggtactttctctagctcaggtggaacagttttgagagctggaagatcagactctgatgaaagatagttaggtcacagggcatcacccttggatgaagttaatgcagtcctccaagaaaggggttaatttttcacaaaagcctgctataaaacaagggtaccatacatgcttgacttctgtagacagctgtttgtttccctttcccttcctgtcatacaaccaaggggcccctagtaagatgctggcattatgtcgtttggactttgtagccagtagctgaggaacaaataaacatctcattgctataaagaacctatcatcgggtattttgttatagcagcacagaatgtaccgagacactattccttctacagtacatgcctcaaaatagtcagcactgtatctaagagcctgaggtaaagtgcactatttttatatcactttttgaaacctgctgtattttcttggcgctacatcccaaagaaacacagacttaataagggtcaggaagcttgtgttatagctctccctctctttagtctactcataccttccacaatattccatctagataaatggcagatgctaatacctgctccttagggaagccacagagattaaataggcaatgttgggagagtatttcaaagatgaaacattctgcataaatgtttaagcattattattacactgctacttcaaatgaaagttctaactttgaaatgtgattatacactttctaggggggaaaaaaccttcataactacatatacaggtttatttttctctctaacaatctaactcatggttgtgaaactttattgcacttgatggagggccttggcttttattagttttaaactgctggtttctggggtatttatgtaaatgaggggaagacaccaaaacagtaaataacaagcacgtccctgctgtttacaaatctgttggtaaaaacgacctaaatagagcacaggaaaatacagctttagtactaatgttttaaataggtttgggaggttttgttttagtttttcactttctgtgtttgcattgggaaggcactcgtgtatgcatacaaatgtgaaggccagaggtcaaccctgggtgtcattgttcaggtactgtctatctttccttttaagttagattgtctcactggcctggaattccccaggtaggctaggctacatacttggccagtaggcctctggtaaccacctgtctcagctttcccagcactggattacaaggctaaccactgtgactggctttttaaaaacaaaacaaatgaaaacaacaacaacaacaacaactccatgggtctgggccttcacgccttcacggtaagcactttgctgactgagtcatcttcccaaccactggctttatattttgtttttgaataatggattttctcaaaaacatttctttgccactctgtaaattttgcttcatgtctgcagttatcactatgtatacatacatgtgttctgtgtgggtgccaccatacattcatatatacatgcatacatacatacaagaaaagaagggaggaaaggatgaaacaacaaactccaataatttgcaacagtagtgaaaaacatgaatggtataaatgttcaacaagtctttttatggattatttccatttatgagaaatatgaaacccataagacctctatgtaactattagaaaccatatgttactatgcctaccacataatttagccattgtacttgtaggtatttacccaacagaaaaagaaaacccatgctaatagaagtacttgcaataaaagtctattagaacttccaaataaaaactggaaagaacccattgcccatgaagaaaaaaaccactgaatgatatgacacaatgggacactattcagcaatgagaaagaatgatatgctgataaacgcgatggcatacaagaatctctattcccatagaatgaacaactgcagacagaaagagtgtacatatttaacattctagaaatcagaaattgcaggaaatgcttgcctgggggtggactagggcaaggggaagtgggagggtaataaagggacaatagtcactggttgaaatgtaaatgggtttttggataaatgcatactttgaaacattgaactatactctgtaaatagtcttaaagataaataagaccacatactggttaaagtggatacgggtatatttaatcaggactgtactagttacagcaatggggtaagagtccaatgtcaactgtgatcaattttgattgttaaagaggtaactgggcattatgaaaagaaaatgaaatcgaaagcagaaagctgcttagtagagtaagagatgaaaaataacaagaagaaaggagctgtttcgtgtgaagctcacttaggaatgcaagctccttgcttcccacagaggaggatgttaggagctctagcttcatgtatttacctaaataaaaaggaaattcttttagcaaacttgagctttctccagcaactgtaaggagcgctaggaatacctagaacagggcttcctaagctctttccactactaacaccttttcacccaaagaacttttacatagctctgggcatacaggtatataaaatatgcctgtcaattaaaaaaattactgataagtcaacaacttatgctaaatttatatgcatataattttgccatttattaaagatgaaagaaaatttccccactaatgagatagacaaattttcttatttttacataaagaattgaatcagcttaacatttggtactgcaaagcatacatcttcaataatttttaaagtaggcaaatacttttatgtcaatttttttttataaatttgtagtactgaatggcataagtgtatttaggacatttcagagattgttggaaattctgtcctaatgccaagccaaatttattgaatgatttttatgaaatttaagtaagcaattcaaacatgttttacttcaaactatttttaaaccaaatacttgtaacacaatttaatgtaaagatattaatttggtgcttacatttgatagatgacagtatgacattaaaagtctttgttttcagtaattaaactcttacgtttctgcaagaacagaaaactctgcacacatagtaaaaatacttcagcttataacatacaatcgtcttgaatctgagcagggatgatccaggctggattaactggcacatcatagcttgacagtgtcttgtgctcagaaccaaagtggagtgaggctgtgagatgcaatgagcaagcactgccagaaacccaggccagtccgtgcttgattctgaattaaggtttaggtttgctaccgccatattccattatgcaacttcatttggggtcacaactcaaagtttaagaagctggactctacaggatgaagccttgagctttacagataatgtcagtgcttgagacctcataagccagtgttgaagctataggaacaccactgaaatggtggaacaatgcctacttcttaacgatgggatcatggtttgtttgtttggttgttttttcctgttgcacaatgaacctgtgtgacattaatggaaaaaaacgaaacaatctaattgtatgggaaaggtttacacagaaatgcatacaaacatataaaaggtgtactatctcaagtgataatgagctatgggtgacagcctgaaaaccttatcaccaccacccagctccaagcggctaaggatgctaccagagagtaatgccaagttcctcagcactatggaaactgttttaattctaagcgtaccattcttcctcccttctagaattcattccacaccatgacttttgtgttatacctgcccaaatagagactgcattaacaggaaaatggtcccactccccacgccctaaggattttgaaggacacaataatgttgatctggtgttcacaaattgtaagtagtatggaatatatacggcatctgctttagatttgttatgtcttagtgtggttttggtcccatctatttattaacaaacagtgctttctcctctctagccatgagtttcctagttcataaagtaggaaacgtagctggtgtttgcttccttccagctcgagaatttgatggtcctatgcttccatcatcaaagcattagaaagacatacttttacatgccacagaaaaaggtgggtttttctctttctggcattgttctttcatttattagaagcaatggataaagatattttgagcttatttttgtaattgtatagcttcttaatctttctcatctattacccaatgggctgtgattatcaaatagttaaatttgtattggctttgaaatacctcgttaaaatgcacacattttttctgatggaagtctctctctctctctctctctctctctctctctctctctctctgtgtgtgtgtgtgtgtgtgtgtgtgtaagccaaaggctaacattgggtattgttccttagctgcactccccattttttccttgagacaaggtctctcactggcctggaactcatcactggttagtcagtgagcagcctagggactgtcctgtctctgcccctccagtactggattacaagtgtgttctaccaccaccaccacccccaacccctttgtatacttttaaacatgggttctgggggccaaactcgggtcttcatgttagcaagaaaggccctttatcaatgggactatctcctcaaccatagaaggtattctttacactaaagcaaaatacatctttcgacaagaagctaaacatgatagttgataatgtctttatttgggcgagattcagtttgtagactcaacttttagttattgttaatcaacaaaagtaatggaaacattttatttttaaagaatttttgcccgaactgacataaatgtacactctaaatgtaccacattttctgtatccattcctctgttgaggggcatctgggttctttccagcttctggctattataaataaggctgctatgaacatagtggagtatgtgtccttcttactggttggaacgtctgggtatatgcc

SEQ ID NO: 2287 - DNA, 3508 bp, Mus musculus
ggtgcccgcaccatctaggagcgctccgcaggaggccatacctccggagcctagtgtcttctgccctccttagtcatggcgcaggcccaggaggacagcgaccccattggatccatcctaatccagattcacatcgacaagtatctaggtgttgtaaaccaggaggtgttaatggctcctgtgaagaaaagcttggaatcccctgtcacttccaaatggtcgattccaactgtaattgaccagaaatcctttattttccccatggattctgatttttggcgacctcaaaagcatcgcggttcattgctacacggccttagaagagcaaagccaaagatacagttgactacgaaggtcatgcaggaccctgagaacaagcaccacagggctgctgtaactgctagctatgggatcagtttgccacatattaaccagaggaaagcccaggataaggttcagcggttaataaaagggtccacgatctccaacctcacagttctgccaccctctcatcgcactgacccccattttatccccatacctgtcttgcagaaggatgccagtaaaggcgtcttaagtatgattgagcgagggctgatccccccaacagcgaggattacctttcagaacccacccattaaaccccaagcacttcctctgcacagttttgatgagcatcgtaaggtacccatggaagcctcctttcctctcgctctcaagccacgcccagttcctgaagaagtggaggagccttctcaccagatagaaatacccaagggcatgaagattaggacaccgtctaagactaggaaatcaccatgggattatatattttctgtttacaacggctgtgtagacaggacagccccagacttcttagcattcaaatcacgcttcaaattaatctgggggagtattttttctttcctggaacaaattgagaaatttctcaaggactatgcaatatctgaagccaaaataaaagggaagagtctggtgtccctgcttccagagtttgagctgaagaacaaattaaccagaaatgatgttctggctgtgttagagaacccagttcacattcagatgctgttaaaccttccgggacagaggtacaagggccaagatggaaaggcagaagctgccaccaagatccaagccacgtggaaaagttacaaggcaagatcttctttcatttcttatcgccagaagaaatgggcctcaggtgtgatcgccctggcgtggcttttacattgccacaggacaagactaaagaggatagtgaaggaatcccgacagagacacctggagaacttccgcattcgagcccagcatctggcagccaactggagtcgcatcaggacctccaggaggactattatccatataccatcattagggtactcccagtatgtgagaaaacacatttttgatttggacgtagaacagaacatgcagttggggaggctgtgcgacatcatagatgccaacgtcaatgtcatctacatctgttcccatcctatgacggatgagttaaagctgtactacaggaaactcctgagtctacaagcagctgtcaaaacggggtactacggggatcggactgacctgcagaacaggttcagaattatcacccctgaagctgtaaacgtcttcactaagcatcacatgtgcctggccactcacctgatgtacagtcccaaggcaatcaaaagaataaaaaatctcatccgaggagaagaggcctacatcgtgggcgggatcctccacagagacgacttagctgtggccgatatgctgaatgtccccatcctgggctcagagcctgagctggttcacctgtacagtgccaagtctggaagcaagcggatctttgataatgctaatgtgccaatgcctcctggaatatatgacatctatacttaccaacagatgatagaacagttgagccagttggtgactgataacctgggaatccgacgctgggtctttaaaatgaacacggaatttggaggaaatgggacagcattttgtgacattccttcccatctacagtgctacaactgggtgctgaaggaaagaaacagatttggccatgaggactggaagaagaagtgggcacaagagtcagctctggtgaagatctccgaggagctggcgggcattttagcacagcacgtacagctagtcaatgagaaacggttcccgacgtggaggaaattcctccacatgtttctcactcaaggtggcgtgattgaagcatacccacctgcagacagcgtcaccaacctcacagtagacatgctgatagaacctgatggagaagtcagggtgctgtcaatgggagaccagcttcatgctgatggcccctttatttcttctggtaccaccatgcctcagacctcagtggatccccaagttctcaattctttgtgcctccaaattggaaatatctgcaaagagaaagatgtggttggttatttttctatagatctggtgactttcattgatccgagcaccttagagcagcaggtatggacaacaggcctcaacctctcatacagtgaccagctagccatgacgcagctcaccctctacctgacaaatggtcatctgaattgtagtctgagcaccctggaagtgccccgttttactgaagattcagaaagggaaaggaagcgccttagcatccaggcagagctggcaccagaaaccagtcgctatgcagtgatgtccacccagctgaagcatgacaatctctcactaatcttctattacgtttttctccagatgtgtaaggcccatggcattggctatgaccttgaggacagacaaggaactgtttttatattatatgaatctctgaagagatacaagttgggcatgttaacaatcggtgtggatctccagggggtcctcatgacctttgctcgcaatctcttcatcatccatcaagaaatatcagcacctgatatgcaaggcgagaccaattttaagactaccattgatgatattgaaaccattttaggagtaacagaagaaaataaaatgatatttgtaagagaaaaacagagcaaagaggaggaagataacctttatgaacctgttgaaatacactcagaaatagtctgactttggatacctgtctagagcaagaaagaatgtttgctttgcaattagtataaaagtggggaagttagtttgctttgtttgccaagagataaatcagaacaaattgtaatgtaatctttaaaatcttgtttattatgcaacgttattttactcattaaatttaaacctaccggtgttttcggtgtgaatgctaagaaccccttcctcctcccaaagtaaccacgggggggggggggaagtccactactgcatccgcttctctgtaaatttgtaactgtatgagtcactcttgctttcttgcgttttacaagttttctcctgcttccaaaagccacttagcttctgcatttaaaacaccgaataaaccaggatgaccact

SEQ ID NO: 2288 - protein, 1016 aa, Mus musculus
CLLPSLVMAQAQEDSDPIGSILIQIHIDKYLGVVNQEVLMAPVKKSLESPVTSKWSIPTVIDQKSFIFPMDSDFWRPQKHRGSLLHGLRRAKPKIQLTTKVMQDPENKHHRAAVTASYGISLPHINQRKAQDKVQRLIKGSTISNLTVLPPSHRTDPHFIPIPVLQKDASKGVLSMIERGLIPPTARITFQNPPIKPQALPLHSFDEHRKVPMEASFPLALKPRPVPEEVEEPSHQIEIPKGMKIRTPSKTRKSPWDYIFSVYNGCVDRTAPDFLAFKSRFKLIWGSIFSFLEQIEKFLKDYAISEAKIKGKSLVSLLPEFELKNKLTRNDVLAVLENPVHIQMLLNLPGQRYKGQDGKAEAATKIQATWKSYKARSSFISYRQKKWASGVIAWLLHCHRTRLKRIVKESRQRHLENFRIRAQHLAANWSRIRTSRRTIIHIPSLGYSQYVRKHIFDLDVEQNMQLGRLCDIIDANVNVIYICSHPMTDELKLYYRKLLSLQAAVKTGYYGDRTDLQNRFRIITPEAVNVFTKHHMCLATHLMYSPKAIKRIKNLIRGEEAYIVGGILHRDDLAVADMLNVPILGSEPELVHKAKSGSKRIFDNANVPMPPGIYDIYTYQQMIEQLSQLVTDNLGIRRWVFKMNTEFGGNGTAFCDIPSHLQCYNWVLKERNRFGHEDWKKKWAQESALVKISEELAGILAQHVQLVNEKRFPTWRKFLHMFLTQGGVIEAYPPADSVTNLTVDMLIEPDGEVRVLSMGDQLHADGPFISSGTTMPQTSVDPQVLNSLCLQIGNICKEKDVVGYFSIDLVTFIDPSTLEQQVWTTQLSYSDQLAMTQLTLYLTNGHLNCSLSTLEVPRFTEDSERKRLSIQAELAPETSRYAVMSTQLKHDNLSLIFYYVFLQMCKAHGIGYDLEDRQGTVFILYESLKRYKLGMLTIGVDLQGVLMTFARNLFIIHQEISAPDMQGETNFKTTIDDIETILGVTEENKMIFVREKQSKEEEDNLYEPVEIHSEIV

SEQ ID NO: 2289 - DNA, 267502 bp, Homo sapiens
ccgtcttaaaaaaataaaatagttaaaaaaaaaaagtgggcaaaaaagatttgaatagacatttcaccaaagaagatattaaaatggactatatgaacatgaaaagatactcaacatcatgagttattaaggaaatgcaaatcaaaaccacaatgagatactacttcacatccactagaatggctataacaaaaaatactgacaataacaagtattgttattgtccaaagatacggagaaattagaatcctcacttatgggaatataaaatggtgcagccactctggaagaaaacagtttggcagtttcttaaaataccaaatataaatttaccatatgacccagcaattccactcccaggcatccacccaagagaaatgaaaacagatgtcccatgaaaacttgcacaagaatgttcataacagcattattcacaatagccaaaaagtggaaacaatccaaatgtccatcaactgatgaatggataaacaaaatgtggtatatccatacaatggaatatgaagtacatgctacaatatagatgaacttcaaaaacattatgctacgtgaaagaagccagacacaaaagaccacatattatgattccatttatataaaatgtgtagaaaaggcaaatctataatgacaaaaagtacattagtggtttcacggagctgaggagtgactgcaaatagtcacaaagttccttctgggatgacggaaatgttctacaatcagattgtaatgatggttgcacaaatccgtaaatgtattaaaaaacactgaattatacaattaaaacaggcagattgtatactacttatattccaaaaagctgctaaaaaccacagaaactgggagatactgaccccattactaataaggtaggtgagtgagacacataatattttaggtacttagaacaatggatggcacatgtgaacaaatctggtcaatattcatggaatgaagttaacttgtttaaagtcagatcgcttaaaaaaggatagaattcagtactcaatccacagattttttttcccccacagaaatcctatacaaccccaggaaaattcagacagaacagccaccctgttacatcaagatcacagtgttgtttattaccaaatgatcaaacattttcctgatctcagcaggctggagtttgatccaaatacagtgacacttttttccacttctgtgtcaaaccagccatcaggtctgtatggaaaattaaactctaaataggtttttgttactgaacctaaaatatcataaagcctctttaatagtttcacaacaggccaggtgcgctggctcacacctgtaaccccagcactttgggaggccaaggtgagcggatcagctgagctcaggagttcaagaccagcctgagcaacacggcaaaaccccttctctacaaaaaatacaaatattagccagatgtggtggcatgagcctgtagtcccagctacttgcggtggggtcggggggctgaggcaggagaatcacttgagcccgggaggcgaaggctgcagtgagccgagattgcaccactgcactccagcctgcgtgacagaggaagatcctgtctcaaaaaaaaaaaaaaaaatgaaaaaacagtttcacaactgtcctggtccatcttaatctatatcaatattgactcctgaataagaattattagaaacgtatttgtggtatctgtgtgtactggctccaacataaatacaatgttatgtccaaatttaaaacaattttcatacctttgagagatgaagcctgctagacttcctgggtcgagtggggactagctaaaggattgtaaacacaccaatcagcactctgtaaaaacacaccaatcagcactctgtgtctagctaaaggattgtaaatgtaccaatcagcactctgtaaaaacacaccaatcagcactctgtgtctagctaaaggattgtaaatgcaccaatcagcactctgcaaaaacgcaccaatcagcactctgtgtctagctaaaggattgtaaatgcaccaatcagcattctgtaaaatggaccaatcagcaggatgtgggcggggccaaataagggaataaaagctggccacccaagccagcagcagcaacccgttcgggtccccttccacgctgtggaagctttgttcttttgctctttacaataaatcttgctgctgctcactctttgggtccgtactacctttatgagttgtaacactcaccgtgagggtctgcagcttcattcctgaagtcagcaagaccaagaacccactgggaggaacaaacaactccggacacaccacctttaagagctgtaacactcacggcgaaggtctgcagcttcactcctgaagtcagcgagaccacgaacccaccagaaggaagaaactccggacactcacaacgagggttcacggcttcattcttgaagtcaatgagaccaagaacccactggaaggaaccaattccagacacaccttgaccttacaaaaaatgattttatatcagattgcattatttgttgagtatcattatttgttgaggaattactggggcatattcctaaagagaaaaggcagtaagttgtttaaaccaaatgaccactgcatactttctagatttttaccttttgccatacaaaaacaaagcagttaaatggtccagaaataaaagtctgattctaaacatgctcagaaccctccaggatgataaaatattttctgtatcataagtggttttgtacaatatgggctgatgtgtaatacttttccactggtatttctcctcctactctccgccaccccctcatttacggtatgccatttaatgaaaggacaccttataatcatttcacacatcaacaatatctaaaagactagtctaaaacttcgcacgaaaagtcaaattctctactctacaagtaaggaaacaaactgtataccaatagagtcattttcatttattatttaacttatcacactttatctactaaggcttcaactaccatcaaaaaataaactaattgtaaactgattttgagagccatagttttcattttaatagtaaaatcacctactgcaatttctcctactgcttgctacctgcactctgaatccacacagtctagttgctaagttgaccatattttacatgtatagaactggaattgaatcttagctccccagcttttgggaactgaacaactttgggaaaccacagctttactgaactttaacttcacatacacacatactggaatgtaatgtggacatgttttttttaagtccctttgggtctggagaaagtatgaacatttatgcttctcctcctctttagattgatgacaacctccctcttttaataaacataaaaatcaatccttcttttaatgttggttgaaaaaatgtaaatatattaagtatcatagctaaaaacaatcagttccctcaccccagtcatcagttgaaatcactgccctcatctgaccatctactgaatcactctgtgatgacaactctaggcccttgtggtacatcttgctggcccaatcttccattctttgaagaaaataaagacatggaaatatacaatccaatcaaaggcagaatcctcttaccacaacaaaataagtaactttgcttaagtaaaaattacttattcccagagtaaaccaaagagtgcactcaaaatacttaaagaagctacagaaaaacacacatttgaagactcaagcttttatccccattctgttgctagacaatggtgtcaaagcagcacaatagcctctacctttgaaataacaatgttctctttagtaaattacttcaagatacttttgcaagtataggagtctgacagacctagaaacaaattcccaatcttgcagaagaatgcatgttttccaaagaagcaatgtcatgaatatggctggctttcctgtgtaactctccaaggcctagtttacccattatataattgtgctttctggttttgcagtttcagaaacctgaggaccggagggttatttctatgggtaaatgcatgtgaatttcaaacacaaaaggttaaattttctactccataactaaattttctactccatctactgcaaccttaaaataaggcttgattcctaagttttcaaaaactaaaagagaaaaaacattaagtcaagttaagaagcattatataaatcttgcataaaaataagtaacataataacccagaaatttttttttttaagaccgggtctcactctgtcacccatgctggagtgcagtggcgtgatctgagcttactagaacctccacctcccgggttcaaggaatcctcctgcctcagcctcccgagtagctcagattacaggtgtgcaccaccacacccggctaatttctgcatttttagtagagatggggtttcactatgttggccaggctgctctcgaactcctgacctcaggtgatcagcccccctcggactcccaaagtgctgggattacaggcgtgagccaccatgcctggccaataacacagaattttacatctagaagagatgttagaaatgatctcaaataaccctttatttttaatgttaatcctgtacggtaagaatcaccaatacatagcatctctgagttcactcaattgagaaaataaaaatccagacactgttagactacctatcaggtatgcataatgctcttttttaatatgtatttaatttaatacacatattaaataatgctccatttattggtttcgatggcaacaatttttttcccctccattcagaattaagactttaatcatccgaagtggcaatgtgagcatattttaaaaccgtttaggggttaatcgtctctctcattgcttacaccagtgccaccaccttaaattaaaatagttctgactgctaaggaatctcaacacattacattcacacattcctatgcatataaatcctgaatttgaacatatgctccagcacctgggcaagtcatttagtatttccaaagcacagtttcttcatctgcaaaatggacacaacctaccttcacagggatacaaagaccaaactaaatgtgaaaacatgtttgggaagagtacagatatacatataaatgcttgctatgattataagagctctaaatttctacatttcactaaaaggaagaattttgttcagatgtagaaactgaatgaactacagttgctgagttggcattacacactttaaaaccaaacaagtttccagggacttttctatctaaagttccttctagggaagtagagtaagatgttaaaacttacatatcttcattttaatattttcacaggtggaccatacactttctttctttcttttttttctttactggagactttgaggcagggtcccactgtcacccagggtggtgtgcagtggcatgatctcggctcactgcaacctctgcctgctgggttcaagtgaccctcctgcctcagccacctgagtagctaggattataggcacgcaccaccgtgcccagctaatttttgaatttttagtagagacggggtttctccatgttggccaggctggttttgaactcctgacctcaagtgatttgcctgccttaacctcccaaagtgctgggattacaggcgtgagccaccatgcctggcacatggaggatacactttctacattcctctcaagggcaggaacagtatcttaggcattattttagctgcagtaactggaacagagactgtctctgtgtttaataaatattcatcagaatatacttttccagaataaagtaaaacttttgtaaaatatatgtgaggtggaaagagctctggccatggagtagatatttgctctcatatcgtgtattacaagtccctcaagcatcctgaggcttcatttccctttaaaaaatctaccctgtcgccgggtgcggtggctcatgcttgtaatcccagcactttgggaggctgaggcgggcagatcacgaggtcaagagatggagaccatcctggctaacacagtgaaaccccgtctctactaaaaaatacaaaaaattacccgagcttggtggtgggcgcctgtagtcccagctactcaggaggctgaggcaggagaatggcgcgagcccaggaggcggagcttgcagtgagccgagatcgtgccactgcactccagcccaggcaacagagtgagactccgtctcaataattaaaataaaataaaataaaataaaaaatctaccccgtcagtaatgccccttttatccgatgtcagacatccacccagaatactgcaaataaggcctttgagtgacaaaaagaaaaagtttctaatgaagtccatgcatgcactttatgcatagtagaggcctactgattcttattttaagtgcgtgtgtgtgtgtgtgtgtgtctgtgtgtgtgtgtgtgtgtgtatttgagacagggtctcactctgtcacctaggctggagggcagtagcaccatcacaactcactacagcctcgatctcccaggctcaagcaatcctcccacctcagcctcccaaggagctaggacgaaaggcacataccactatgcccggctaatttgttaacatttttatttttattttgtagagactaggtctccctatgttgcccaggctggtcttgaactcctgtgctcaagtgatcctcccgtcctggcctcccacagtgttggaattccaagcatgcaccactgcatttggactgttttaagaataattctaataagctgttacttggttatatttcccactggtggttaaaagcactaagatagatcagatgtccaaagaaagagaaattggagaaccctaaaggtttctctcgctgatacatgaagtagaaccaaactttcccaaaaaggtagatccaattcaatccaaaactattccacggcctaatatcaccgaacacttgacaaaatattatgcgggctccatctcttacctcaaaattagagtcaacctgtgattaatttaatcccagctttaattatagtcaaagaatgaatgctcagcaaatacttcattttaacgctatccactgctaccctattcacaaccttggaagaaattataagccctcttttatggttcacttttccttattcaagtaatctgctcactagctgttcttcttttattttttactacacgacagtaacgagttgcaatggaaaggtcatctgatcttaacccgaactggaattatctaagagcattttatatacagagataaaatggattattttacagaattaattttacccccaataatgctaatacactttacagaagtacaatgttactatttgctaactacaggtaatcagctacttcaaggcagggaccatgtttgccgattgggatcattaaagcacacaacagagcaccatagcatttagaataattaatattcctgagattgtcttgaaaagacttccatgtatcgctaataggattcctaatgcatgtaagtcttttggaaagttagttacatctttaagaatcttgagcaaattctggtttattcactagatggatatatgtgagaaactaatttttgataaatctgaggataagaactgtgtatttaaaaaatttttaaaaacagaaaaaattgtgtattaaatgtaattacaattatttctttttaagaaactgcaatggaaaaaaagactggaaagaaatgttagcagtatttgtagttgggtaatgagactatggctattttcttttctctgtatgctaaattttacttagtatgcactagttttacaatgaaacaattaaagaaaaaagaggaaggaaggaagaaaagaaggaagaaaggagggaagggagaaaataggaaggagcactgcttaaaggtaagaaaatggcctaattagaccagttagtaaccacttagttaaatgctataattaagcttttaccctagcaaggaactttctaagtgatcacaaatgataactaagtcatataatatctgcactgaagggacatcttacctaattctgtcatttgacaggtgtagcaaagaaattataattatacaatgctttacagtttacaaagtgtgttcaaaatgtcacatcatctgtccttcaaatactcctgaaataggctcatatgccccattttaaggatcaggaaattgagggttacagagatagtaatgtgccttaataataatgtctatgatttatcaaatgtttactatgtgccagactcggggataagcacaatcttgcgaaaattatccctattttatagatagaaggtgaaggggccgggcgcggtggtgactcacacctgtaatcccagcactttgggtggcaaaggcaggcagatcacttgagcccgggagttccagaccagcctgggcaacatggccaaaccccgtatgacggggggggggggcaattagccgggcgtggtggcacacacctgtagtcccagatacttgggaggctgaggtagggggatggcttgagcccaggaggcagaggttgcagtgagccgagataacgccactgcactacagcctgggcagcagagtgagaccctatctcaaaacaaaaataaaaaaaaggagagaaaagagaaagtgaagggtagccaggcacagtggctcacgcctgtaatctcagcacttagggcggccaagacaggaggatcacttgaaaccacgagttggaaaccagcctgagcaacatagcaagactctggctctacaaaaaataaaaaaattagccagggttcgtggtgtgagcctgcagtcccagttgctcgggagactgaggcaggaggatcgcttgagcccaggagttcgaggctgaagtgagctatgatcgcatcactgcactccagcccgggcgacagagcaagttcccgtctctttaaaaaaaaaaaaagaaaagaaggaaggaatgtaggtaggttaggtgacttgctcgagatcatacagctaagtcactgctctgattctaagccatacacttaaaacagaagtcttgagttacctataattcaacttcacagagccctttagtagagttggcttattatccagtcccatgttctctcttttaagagttagtaagtctgacagccattatgagggtctacaagcaaaagcactagcccaatcatacccaaaaactcatgttggcggagagcccatgcctcagatgaaaggcgtgaataactagagtggagcggacaaagctaacaagtcttataatgtacacattaagaagcagaataaacttcagagtaaatacgcagaataaacttcagaattcagagtaaacactctctcccggagcagcaaggataacaacatcacgatatcaacaattccagcaccttacactcctgtaacctagcgcaatttccggagagccttcaggttcatctcaacggatcctcgcaaaaacctgtggcctgggctgagcagagcgggaaatcagtctcactttacacaggaagccgaaaggaacgccgaagaaggccgagtgggcagaaaagcacgagattaagagataggggcagccacctggggagactgggcgcctccactgactggaggaagaacgcagggcccgctgcggggacaaggcccagagaggccgtggtgctgggtccgtcgcccgctgaggctcaggggccttggaggtcggcccaggcgcctatctactcacgttggaccagctggtctcctgagaagacggaggagcagctggtgactaacgcacagggtacgccagcagccatagctgcgctcgcgagccggttccgtcaggcagccgcttccgccttgggctgcaccacggccgccggcgcgagggggagacaggccggagagggcgttctcggaatgaccaggctggcctgaccccgcccctagacccccttccgctcccagcgtggaacaggccaggtcgcgcgcggtgttgccatggggacgagcggctccggctgaaggtttccgtgcttggaaaccgcgcctccgcggaggtagccgttccctgacctagccatggcacagaacactgaaaaccacgaccctgtcggatccatcttaatccaggtgggaaacgggcttcccccggccctgccctgcccagccgcgccacttccgagcgaggtcccgcgcgccgattcaccgacgctcacccatttggtgcgccgcccctagactccctccaactcgcgagaggctcccaaaaatgcccacccagaccttcccccacggcccagcacactcccggtgacttaccctgtaggttacgccccagaagcaggactttctgcctctgggaaaactctaaaaccgttcacccggaacctttacttcagaaaaattaacctcacgctgaggcatcatttttaaatgttatattctgaaaaatttgaacccatgacgtcgggagtggaggagagacaaatcggacactctaggaggtgataagaaatttggagacaaattgaaatatgtgaattgcttttcttaaacaccccagttttttagatctaaatgttcctcattggagaacacacagaaaaatcaagataacttggaatgaaaaaatgtgacatttaaaaacttagtgaaagacctttttaatttgagaggggaaatgtcaagaaagtcttgtccaatacagctcaatttgtaatagttgcactcagatgtttctgaaatgatcatggcattttgttttcacatttatgtgaggtaactttaagatatttccacatatatcatcggttttaactatcacatatataatagctgcatttgactaagtcttgaagtcatttgtctaaggtcactctgtcaggactgtcactcagttggtctgaagtgggtcttactcgtcaaagggatctaatttttctggcagaattttgatctcttacctcccatctaggagagacttccctaaatgtaccttttcccaaatacaagcccctgaactcaccaatttcatagacttccccattaagaatcatacctaatcttacctgatcttttctcaccctcactttcaccatcacgcagcaatgagtttagccaaactgcgaagtctgagggaacggtccacaaaaaactgccctaacttcaacactcactacctgcaagttcaggggtccccagaaccacctcacttcagaccagctgggtacaaacttaggggccccatcaccaccctcacattcaatgattcactagaactattcgcagagctcagggaagtgctgtgctcacatctccaattttattatagtgaaggcatacaaattaatcagccaaggaaagagatgaataggacagagtccaggaggggtacaaacatagagcttttggtcatcttatccctgtggagtcattgacgtcattacctgcattacttcctcccagccatgatatgtgacaatatgcatagaatattgcaactagagaagcttatctgaggctttgatgtccagagtttttactggggctcaatctcacactgcccttgtggttgaccattaatctccagcccctcctgaatacttttagtttcccgctgctccagaggtctgagctgatacagcgtggatcaaaacacccattataaatcatgttgatagactgtctggtggccaaagcccacagacaaagacacttctatcaggcaggacatcccaggcgcctagagatcacctcccagtagccaggagcgaagactggacccctctttgggtaaggttaattctttgctgcacatacccactctttttatagattccaaataattagaacaataatggagactcttacctaggatacaacattatagtaatagataactgttgacactgacttgtgagatgggtcagaagagctaatagtcatatccatgttgatctgcacccctacttatttaaaaggattcctgtggacatatcaagtaaagggctgtgtagaggaagagagcctacctgttaaccagattattaagactgattcctgtatagtataaaattctattctctacatgtagaatatgtatagtgaggaaatttggaagactttccctactttctcagtgaatcctgagaatgtgtgagtatgtagcaccacccaactgtgccaacgtggattccacttctatttggggctatgatttatttccctcagacaggctaccaataattagtgtgtctagtggaaagcacttgatagggagtcagaatactgagatctgaccatgactttgacagtctcacaagtagtgactttgagttaggcactcatctctctggacctcactttcctcttccataggacatatagtttggattaggttcacttctgactttaaattgtcccaatttccccaggctacatcatttactgtaaaagtagacttcctttgttgttagcctaggcaatcaaattgtttctggcaagtcagtgactgagtgagtgtgtgtgtgcaatagactgtaaagcagaggtactttaaatttctacttgcttcaccctaatatggtcagttacgtctgtgtatcagtcagatatattaaacagctttttagaccagtggttctcaaaggtgttgtaagtattattttttagctccagtttacagaagacacttaggtacaaagaagtaaagcatcttgcccattgtaatacatccagtatgtattgatccttaaataggctatggcatgttcatgaagtaatcttgaagaagtgtgatagtgactctgggaagtttccaatcatgctttgtaaatcttagaagctttgtttttatgcttcattaaaatgtggtatattcttaatatatctttataaatacttgcttgacccaaatattaaatgtttgtgtaacaaatattacctgatcttatgattcaaaattagctttttaattaaaatccaacaattgtgtgttaacacaaaaatccaacaattgtatgttaacaatgatcttggaaatatgggagctcaattgacagtttgctattttcattctttctgattgtgtctgatttgtcaggtgcatacaatataaaaatgaatgaagttggccaggcgtggtggctcatgcctgtaatcccagcattttgggaggctgaggcggatgaatcacttgaggtcaggaattcaagaccagcctggccaacatggcaaaaccccgtctctactaaaaaatacaaaaattagctaggtgtggtggcaggcacctgtaatcccagctacttgggaggctgaggcaaggagaattacttgaacctgggaggtggagggtgcagtgagccgagattgcaccagtacactccaacacagcaagcagcacagcgagactctgtgtcaaaaaaaaaaaaaggccaagcgcggtggctcatgcctgtaatcccagcactttaggaggccgaggcgggagaatcacctgaggtcagaagttcgtacaccagcctggacaacatggtgaaaccccgtctctactaaaaatacaaaaattagccgagcgtggtggcatgctcttataatcccagctactcaggagactgaggcaggagaatcacttgaacccgggaggtggaggttgcagtgagccaagatcgcgccattgcactccagcctgggggacaagagtgagacttcatctcaaaaaaaaaaaaaaagaatgaagttaaagataattgaggtgatgagaatgactcagccaaactctagcagagatgaagaaaatggaattttatattgcttttgacaatatagagtctggtttcatggctcttgtaaagtctagagcaaatctttgctgcattaaatctttcaagggcttcttattaagtagctctgtctccaaattgtcaaaataataatctttctccaagtagaaaatttatggaaaacaaggtgtttgatgatcacagagatgatggatgatatgtaaaatttcaatatggtagattggatctatctgaagaaagagatttagaactcaaatctctttttctacccaagtctggttaactttttctatagtatttgtctctattgcaattatacaaacagatgagtggttgttaagaggggaggagaaaatatctagcaagaaaaggaaaaactcttgagaaagattagggagcaagttattcaattaacatttacgtaaattcaattaacatttacagggtattacttatagtgtaaggagtttcactaggttttataattcagaagagaattaacatttgttcagtgccctcctatgtgcttaacactatacaaagtacttatatttttactcattttattcttgccactgttctgagatagctattattattcccattttacagatgagaacactaagcctctaagaggctacataactttcccaagttcagtttagtaaagaaggaagaaggattccagttcatatctgtcagcaccaaagcctatattgattcattttcatacatattacctcattttcattcaacagttttaagtagggtaattcttttttatcctggacaaagaaattagaaattcagaaaatttagatgtatatggaaattgtgtgactaataagtgatagagctagacattatattcagctgccttttattgagttcttgctatgtaccaagcctattacatactatctcacaacactatgatgaaatatcattgtccacacaaggcaggtgaaaagaaaacaaacctttggtacagtttttactccctccagtagttgatagacataattacagaaagatacatggagctacagatactagaagagggaaagtcagtacattcaaaggaggaaccaaaaaatgcaggcctagagagggccttgcccttgaactgcctctctgtactttccaaatgtcttcagacaatagatggcaaatcagcttgcagcagtaatttggacaaaacaatagaaagaagtatatctttatctttagtgcttacaagcaagcagtaggtgtattcagatttcaatctgtgagctctgaaggccttacatgacaatttgtgaagagtacaaatgaccagatgtgtctgccagactgtgatgcccatcagtgaaaaggtgtaaattctgatcttttgaataattggctccatgtgaacatttgagattaatcagtaacgcaggctggatcagtgttcagtccagttatactaacagagaaaaagtaacttcttcaaaatgcctttagcaacccaatttgcagattgttattggtgtgactattgctgaaacaggtgttgggttcataaatttgcataacaaaatgtttttcttgtggcagcagcccatacaataattggtgccatctgtatttatctgaagtttggtttctaatatgaatgcagagaatcttgtgctttcaaatttcatagggcccattttattctgagggtgcctgatgttggagagaaatccatcatttccaaggaaaatacaaattgaaggaaaaatgttaaagtaataatatatgttcctttttcttcagggattattttcatttctcactacataaaacaaaatcaaggtcaaacacctaccaaactccttcttcagagcagtaagtggggaagacccagcctggaatggaaaaccaacaggcactgacaacacatttacaatagtcttttcaaagacattgcttctgctacaacttctttgctggaagttttttgttttctttcctcttaaccaatctgtagaaattggagtctggcacaaacctcttatcatctctgactgaactcttaccacttaagaaagtagaaactatttgagttgcagtgttatcttaaatctatttctcatgggagaaggaaaaacaaataatatgaaagaataatttttcacaatctgagagacaataatagagcattctcaataaagaatgccttagaaccaggccaggcatggtggctcatgcctgtaatcccagcactttgggaggccgaggtgggaagatcatgaggacagtagtttgagaccagcctgaccaacatggtgaaagcccgtctctactaaaaatacaaaaattagccgggtgtggtggcaggcacctgtaatcccagctactcaggaggctgaggcaggagaatcgcttgaacctgggaggcggaggttgcagtgagcctagatcacaccattgcattccagtctgagcaagagtgaaattccatctcaaaaaaaaaaaaaaaagaatgccttacaaccgtaaaagtggtccttttcaatgaataccataaaatcagctttgtgtctctaccaattcaagtacattgcaaacctttaagataaataactgctataggtggactatgtgtggattatttcaatatttttcattttttatacctatagatccatgaagacctttatcagttaaaggagaaattaacaaaattctcacctgaggaaaaaggagagactctagacattcagagtcttgaaacagcaatcaaaaggactgaagtggggttaagagtaagtagagctttagatattaaaatactggaaggagacaaagcatcctctagaagaaaggaattgcagttctcatagagtcctgcataattctgtaacaaagctgaatttagggcagtcgtcagcattcttgttttgttatttgttctcataattattaactgattgatttatattctgtcatatttcacaaagaatttaagtaggttaaatataagattatgcagtgacaactcctaaaatgtggttttataaaaataacttggagtatgaaaaataattactattacttgatcttagccaaaaggccaagaagcgatgaaaaataattactgtcaatccaacaatatgcctgaccaatatattgcagattttctggaatttactgagattctaaaagagaagagttggctgggcacagtagtgcaggcctgtaatccaagcactttgggaggccaaggcaggcaggtcacttgagcccaggagtttgagatcagcctgggcaacatggcgaaaccctgtctctacaaaaattttttaaaaaattagccaggcatggtggcacacgcctgtagtcccagctactcaggaggctgaggtgggaggattgcttgagcccaggaagttgaggctgcagtaagccttgatttccccactgcatttcagcctgggctacagagtgagactctgtctcaaaaaaaaaaagtatataaaaaataagagttgactttcccctaatagcctaaatattttgagctattcgtttttgtaacgttataatcaaatgggtaaaactaaagaaatataccaatattgggccagagaaataaagtaaataggaacttcatcattacaaagagatctaaggtcggggagaatccagtctttggaccaggataatattcatttatgaaacaagctaatggggtccatcttccatcaatctccaccttctatacctcttattttcagtgtctctgctcttgattcagacttttaatctactatgttatctgcttcatctctcagctcccaaggctgtgagaaatgtggtatattttgtagcacatcattgtcatattacctaatggtgagagggatggacccagctggagtctttgggttggctcatttaaataatgtttcctaaagaccaaatgctttctttggatgcttgcttgaagtccctgtaaaaaaaagacattactcaatgtctgtattgcctagtagatttacctggctaaaaatgcattgactattgtgcacaattttatttgtaaagagtgccatacaggctgggcaatgtagggaaaccctgtctttttacaaaaaataaaaaaattagccaggcgtggtggcatgtgcctgtggtcccagctgctcaggaggctgaggtggaaggattgcttaagccttggaggctgaggctgcagtgagacatcactccactgcccttcagcctgggcaacagagcaagaccctactaaaaaaaaaacaaaaaagagtgtaccacaggtcactcaagctttgagtctcagtttattatgctgggatggttgaagtaatttggccttgagatgcctaatgataccttaggcacgtaataatacatagcatgttgtggttttggcttaattacaggattcagagtattaacctaatgaagtaaattagctgagtatcttaagtccacaataattgcctaaactttgacatttctgtaacagattcacattgagaagtatttaaatgttgtaaaccagaatgtattaacgacttctgttaatgatgagagcttatatactccccaggcttccaaatggtaagtaaaatagccatttagagcccaaagtaaataaaattgagaaataacttttctcactcaagtgagatgactataaaatataggcaacattttcttggctttcttaacatcctttctattaattctagtagagattttgcataagaagttaatggtagatcaagtacagtgaacattgttcaggtgagggatacattaaaaccaagactacaccatcaacagtagatacatggaacagaattgtacttgtacccctcaagtttatgcagattaaaaaaaaataagttaatggtagaatttggacttcaatgaagtgattatagattatttctattgagttctaatgcttgacaccataataattatttcaatgtcctgggctttgctgttactctttgttgttgttattttatagtgaaaggtatctaaaatttaacttttaaaggaaacattttaatgcaaatcagttttcacactatttagatcacctggtactttatggtttttagaatgtcttatgtgcttgattatacagataattttggtatccagggtaaacaaaacaaaaataaaacttgcttgaaatatctattatgtgcatcctaagagatgatttattaaaattagaattgagttaaaaataagtgaccttgccttatctttggactttttacacacaggcctcctgaatttgaatgagtgtagattaagcttttgtactaaacttaaaaatcctgtagcccttatttgtgttttatatatgcacccagcataaatgaaaaatattaggcagtgaagtaaagtttcataaacagtgcacaagtcaaggaaagctgtagacatagccaagtcagtactagggagcagagctttgggtgtacattggacctgtctccctttccctacatgaaggcagtgccacaggcatccatcatcctttggtagaggcagccctttcctggtcttcctattgttacctggacctccttgcagacataaacatctgtcatctttgtattcaacacagtttcatccctactgcctgcaaggcacttgtattagttatctgttgtttaagaaatcactcatgtagtagtttagaacaacaaatacttacagtttttatgggtcaggaatctgggcacaggtgagctaagtgcatctgcctcagggtctctcacaggctgcaatataagtattgactggggcaatctcatctgaaaacttgacaatgggtggaaggacagggaaagatctgcttccaagctcactcatatagttactggcaggcctttgttcctcactatgtgggtctctcttaagctgcctgagtatttctacagcatggcagctggtgacccaaaagagatccagagagtggaaaagagtgccctagatggaagccacagtcattttgtaacctaatctcagaactggtatcacatctactctgttctgttgttagaagtgagccagtaggtttagcccacattcaaagagaagggattatacaagggcatgaataccagggggtggggatcattgggggccatctaggaggcaaaataccactgtactcctctatttatcttcatgatccagctatgttagctcactcgctctctctctctctccctcctccttctctccctttctctctccctcccctaccatatgtatatatatatacaagagagcctaccaaggcaaagttcagtgcctatatagttggcagccaagaggcctatagcagatagagaaggtgtgtcatcaaaggatcaagcatacaagcagcaagtaagaaagcctcagaatggaaggggtggggaaaagcaaacaggagaagagctgtcaccaattctaatgaaagaatccaatactcaagttctactgtctctgtcttcctctttatcctttcatcttgacagagaaccaggagtctggactgtagattttcaggttatgatagctgaaaagagctacctaggtagcaattgcagctacagagaacaaaacagaaagtatctggcagaaatcttttcttacacagttctcttttgccaaggagtgcctttgctccttactaaggtctggaagagtgaaggaagacattgactggggcacggagttagttcccagaagtggtacttggatcatatctttcctattcagtacagtagtataatcattggccttcttaccaggaagatggggagcctgtcaagtttgtatgggccctataaacctggaggagtggcatgagcatctctcagtcctagctgtgaatgtgtagggctaaagtggcatgccatcagaaatgaaatgagatgggacaaggttaaacgaaaaaactggagaaaaatccaaactgggtcttcaaagtaaacaagcaggtcctgagagtcaaaatgaaagtcacagcgtgtgactcagtagatgggaatatatagaaaaaagagaatcccagagatgggagactatggcccgtgactgacattttctctgctcccaatcatacctggttctgcacttgccccaagacgctgtcatgaatagacttggcttcagagtctggcatggactgctaggagattatatccaaagcaggttacagagcccagaatttcttcaagttctcatgcctagaaggaggagatgggacaattcattgcatttttcttctaaggttccttaacaaagtccttagaatatccaagtaggaaggtgtttttcatttaccaatggcacaactcactgaagagtgggctgcttaatcacaatcttgatcagggggtcaaagaggagacttaactttccttaagttttgaattgggacagaagcaggacctggccttttattgacatagccattggtcaaaggatttgggcatatattcataatatgtgtataattatttataaattatatatttttattatatatagtgaatacattataaaatgtaccaacatataaatttttagtaagataaagataaaataagtatttttaaaaatttttaaaattgtatgaatagcacaaaccttttagttcttgctaacagtgttcattaactataatgttctggttgcttaatcttgttaattatgatggctttatactggctgtaattaatatctcaagacatcatactcggctgggtgcggtgactcacacctgtaatcccagcattttgggaggccaaggcgggcggatcacgaggtcaggagatcaagaccatcctgggtaacacagtgaaaccccgtctctattaaaatacaaaaaaaattagccaggcgtggtggcaggcgcctgtagtcccagctactcaggaggctgaggcaggagaatggcgtgaacccgggaggcagagcttgcagtgagccgagattgtgccactgcactccagcctgggcgacagagcgagactccgtctaaaaaaataaataaataaaaaagacatcatactctatacttaggtgaggttcagcattgatgataggtataagtccataatttcagttagtcttctagataatttttaagttttgggatttttttggctgacttttcttaagttggattggatcatcatcatttttactttctaatatgggtgaaaaaaaagctcatgctaagagtaaaaatgtcaactctcattttcttgttcatggatgcttattatcttgaaaatacagtgtgctttttgcagaaagccttaagacacgtacgttttttcagtcttagcacacttgaaattaaatgacacaattcataaacccactgcatgagtaaactgcagtccattctaatgcgctgagagcagacgcaccagtgctgttccactgttttgtggtttggagcctccactctcaggttgcctccaaagctgcaagggacgttaccacatgagggatcgagtgacaggctgaatattgaatggtagtacagagtaatttcttatttatttcttttttaatataaacagaagttcttatactttcctcacatgaccaatggcatcatcttatgtgtcacctgggatgtgggtactctatttgagagacaacaggtctagagtgatggttctcaaacttttatttgcagttttctttcactggctctcaggggggcatcctagcatctgcattttagcaaacattcttggtatttctaatgcagatgatttgtccttggaatctctgggatgagcatgactgcctggaaccaatatatttttggacatgtagagggcctttctctgtatgattgagagcttggtcctggaaattctactacccggttgctatgaacgattggagtgcctcttgcactgggattgagccaggactggaacccggcagtcaggctagcaggaactgccaatgcctgctcaaactgtgaggctgattgagtatcagaggccaaaagtcccagggcagcaactccttctgagaggggaggcatataatgactgcagatctctgtttgttcctttgacagcagagcacagttcctatgagtaactgagaatcaacattgtttagatatggggcttcactttatctatggaaacccaggaaatagagttaattccaaatgaatactatccctggtcacacctttaaaaaagattttagaacagatatgcaataatgatcattttcattgtcatccttatcaagatcttcatcatcatcattaatattttcataacacccttgacagtttgcaaaggactttctttaaacttacgaggtaaatgtttactctttccctttaaagatgaggaaactgaggctcagagaggttatgtaaaccagtcctagatcacatgcataatcactgatgaggctcaagtcctaatcagatatctacaacctagcactcttttgctccataactgcctgaaaatcagaaagcctaattgtcacaaaagataattttcctttttagccagcattgcttaagggaaaatctggtcgttttgtctggtagagacaaaccagtaggtacacaaagtggtgataacgaatgccagcaaatgcaagattctcctagcagtaatcttaaaacaacgataaggacgttgtcaaaagagctcaaagtgcttttgtattgttttcaaaataggtttcactgttatccacactttggcaatgatttttcttttatgtcaaaggatagttcctcctcttaccattgctggctttcacaaattttattgcttgtgatatctgctcacactgttcttaatgaccatgatttgcttattgacactgggagggtgactgccatctgtaccagcactatcagaactgcacagaaatcttcattttatgttcgctctgttgtgctactatttaggaaaagaaaagaaaagaaacaagaacaaagcaagtaatagtgagaaaaagtgaggggaagaggttttttgttcaatggtgagtgtagattagaaggtgcattgtcattcaattattgaaacaccatggatcctatctattctgggctgttccagtgcagttatatacgatatgactacattctagtcacagagagagaggagagaggagagagggagaaagcatgcataacaagatgttaacacgtggtaatctatgtgaggggcattcgcatgctcactgttctttccatttttctttgggtttgaaactttttaaaacaaaaaaacaaacttttaaaacagaattataaaataaaacataacaaactggaaaaacatttgcaacagatatgacacaaaaattgctaagattcttaaatacaaagtacacttgctaaaaaaaaaaaaaccaacacttgatatagacagaagggcatcaacagaccactcacagagatggaaatgcaagtaaccagtaagcatgtggaaagtgtttaatgccactggtaactgatgaaacacaaatgaaacaaaaatgtctcatcttacagataaaccagagaaatgcaaatcaaacaatatattactattttttctttaaaaataaggaaaacaaattaaaccactataatactcagtgctaatgaaggtacagcaaaatgggcatacttttatcctgctggtagaagtgtaaattagcacaaagttttcttcattcagcttattatttcattgatacataatacttgtatatattttcaaggtacatgggataatttgataccttcttctaatgtgtaaagatcaaatcaaggtaattggattttccattaccttaaatacttattttttctttaagctagaaacatgcaaattatcttctagctattttgaaatgtacagtagagtagtgttaactatagtcaccctattgatctgtaaaacctaggttttatttcttctctctaactgtatattaaacccattaatcaacctctcttcaaccacccctcatccctctcctccttgcctctggtaaccaccaatctactctccatattcatgagatccactttttttttttagctcccacatgtgagaacgtgagatatatttgtctttctgtacttgacttatttcactcaacataataacctctagttccatccatgttgctgtgaatgacaggattcctttgttttttatggttaaataatattccattgtgtatatataccacattttctttatccattcatccattgatgggcacttaggttgattccaagttttgttcattgtgtataatgttgcaataaacatgggactggaaatctctcttcaatatactggtttcctttcttttggatatatacccagtagtgggatggctgggtcttatggtagttctatttttagttttttgaggcacctccatactgttttccatagtgggtatactttgctgaattcattaatcagttctaacagtttttggtggtgtctttaggtttttctgaatataagatcatgttgtctatgaacaaagctaatttgacttcttcctttccaatttggatgcctttatttctttctcttgcctaattgctctggccaggatttccagtattatacggaataaacgttgtgaaagtgggcatccttgtcttattccagatcctagaggaaaggcatccagtttctccctgtttagtatgatgttggctatgggtttgtcatatatggcatttattattttcaggtatgttccttctatatccagtttgctgaaggttttttatcatgaagggatactgtggtttgtatggctccaccaagtcccatgttgaaagttgatccccaatgttagaggtggaacctgatggaaggtgtttgggttgtgggggtggatctctcatgaatggattggtgccattctcatgggagtgagtgaattctactcttagtctccatgggaactggttgaaaagagacaggcacctcttcctctctcttgctgcttctctcaccatgtgatctctatgtcctggctccccttaccttctaccatgaatggaagtagcttgaagccctgaccagaagcagatgctagcactatgtttcttttacagtctgcagaaccatgagccaaataaatctgtttttaaaaaaattacccagcttcaggcattcctttatagcaacacaaacagaataagacaagggatgctgaattttatcagatgccttttagcatctattggaatgatcatatggttttttgttcttgattctgttaaagtgatgtatcacattgattgatttgactgtgttaaatcatccttgtatccctgagatgaatctcacttgaagtctcgctctgttgcccaggctggagtgcagtcgtgcaatcttggctccctgcaacctccaccttctggattcaagcaattctcctgcctcagcctcccaagtagctgggactacaggcacacaccaccgtgcccggctaattttttgtatttttagtagagacagggtttcaccatgctgggcaggctggtctcgaactcctgacgttgtgatccgcccagcttggcctcccaaagtgctgagattacaggtgtgagccaccacgcccagcctatggtgaatgatcttttaaatgtattgttgaatttggtttgctaggatttcgttgaagatttttgcatctatatttatgagtggtattggcctatagttttcttttttgttgttgttgtatcctcatctggttttggtatcagcataatgctggcctcatacaatgagtttgaaatttccttctcttcattttttttgaagagtttgagtagaattggtgttagttattctttaaatggttgataggtagaaattagcagtgaagccatcaaatcattggtttttcttagataggaaactttttgtcatggctttgatctctttactccttattggtttgttgaggctttctatttctttatggttcaatcttggtaggttgtaagtgtccaggaatttatctgttccttctagattttccaaattgtaaattgttgggatatagttgttcataatagtctgtgataattctttgtatttctgtggtctcaattgttatgtctccttttttgtttctgattttatttatttgggttttatctctttttttcttagtctagctaaaggtttgttgattgtctttatcttttcaaaaaaccaccttttaattttgttgatcttctgtatgtttttgtctcaatttcatttatttctgctctagtctttattattttttaccttttattaatttggggtttggtgtgttcttgcttttctaattcctggaggtgcatcattaggttgtgtatttgaagtttttatactttttgatataggcatttattgttgtaaactttcctcttaggactgctttttcactgccccataattttggtatgttgtatttccattttcatttgtttcaagaaatttaaatttcctttttaatttctttattgactgtcattcagaagcatattgtttagtttccatgtgtttctgtagtttccaaggttcctcttgttattgatttctagttttatctcattgtagttagaaaaaaatacttaatatggtttctactttttaaaatttgttgagatgtgttttgtggcctaagacatgatttctaagaatgttctctattctggagaacgttccatgtgctgataaaaaagaatgtgtattctatagcagttgggtgaaatgtcctataaatgtcagttagacctgtctggtctagtatgtagtttaacctgaaagttattgctgattttctgactggatgatctgtcccttactgaaagtggggtgctaaagtcccttactattattgtgttgcaatctatctctctcttttggctctgttacaatgtttgccttatatacttgggtgctccaatgttgcgtgcatagacacttacacttgttctatctacttgctgaattgactcctttaatgatataatgaccttctttgactctttttacagtctttgacttgtagtccattttatctatgtataattactcctctttttgagtttccagttgcatagaatatcaactccatgtctttactttcagtctgtgtctttatagctgaggtgggtttcttgcaggcagcatatagttgggtcttgtttcttttatccattcagccacactgtgttttttaattggagaactaaatccatttacattcagtcttattattgctaagtaaagacttaccatttttattgcttgttttctggttgttttgtaaattctctcttcctttcttactgtctttcattgtggttaaattatttttctctggtagtatgttttaattcattgcttttttatttatttttaattaattaatttattttttggagacagggtctctctctgtcgcccaggctggagtgcagtgttgcaatctcggctcactgcaacctctgcctcccaggttcaggcaattctcctacctcagcctgctgagtggctgggattacaggcgcctgccaccatgcctggctaatttttgtatttttagtagagacagggtttcaccatgttgccaggctggtctcaaactcctgacctcaagtgatttgcctgcctcagcctcccaaagtgctgagattataggcacgagccaccatgcctggcctgagccaccatgcccagcccattgctttttatttctaatgtatctgttatagttttttgcattgtggttcccatgaagcttataaaaacatcttctagatataataagttattttaaagagataatgttatcttagatcactaaaaaataatagaaacaaagaaaaaactttaaaaaaactctacactttaagtccattccccatacattttgactttttttggtctcaccttacatagttttatattgcctatcttttaacaggttgctgtagctattactgtttttaatagatttatattataggcttcatacttgagtttgagtaggtgttacaccacagagtattagtgtattctgaggttgtttatgtacttaattttaccagtgagtttttttaccttccaatgttttctctttgcacattagtgacttttttctttcagactgaataactcccattagcatttgatgtaacatgggtctggtggtggtgaattcactcagcttttgtccgtctgggaaagactttatcttagcatatttgaaggatacctctgatggatacagtattcttcgaaggcagcttttttcttttagcactttgaaaatgttttcacattctctcttggcttatatcgtttccattgagaagtcgtttgccagattaattagagctcctttatgtgctatttgcttcttctctcttgctgttttcaggatcttctctttgtccttgacctttgagagtttgattagtatatgttgggatggtcttatttgggttgaatctatttggtgttctctgcccttcctgtacctggatatttctgtctttctaaagttttcaaaagttttctgttattgtttctttaaataagctttctaccccttactcttcttcaactctctcttgaacatcaataatttttagatttggtcttctgagagaattttctatatcttgtaggtgatcttcattcctttttatatttttcttctctgactgtgtgttctcaaatagcctgtcctgaagctcactgattctttcttctgctttaaccattctgctgttgagagcctctagtgaattttttagttcagcaaatgtatttcaacatttctgtttggttttatttttattatttcaatctctttgttaaatttctttgataaatttcttaattgattttctgtgttatcttggtgatcactgagtttccttataattgctattttgttcttggtcagagatctcgcatatcaacatctcactaaggtcagtcactggttccttgctttgttcattttggggaagtcatggttccttgtttgctgttgatgtgcctgtatgtctgtttctttgcattaaaggattagttatttattccagtcttctctctctggcttgttttggtttttaatggatatgcttgcttttttctttgtaatttttgaatatctttttttcccccactaggttgctgtctcctttttggcactagatggcaacttaagcccggatttgtgtcaaatctaataaaggatcagaatgctgcctgtcccaaatggaagaggtcccaaaggggatattctggcaatgtgggtcagctggccaagggtttgtgccaaggggacctgtggaacatactttctacagcatggtactgccactctgatttggtgtctcctttggcctagttacagagcagaatatctagggttgggatggttgtctcacctccctactttgtctctggctgtcctcagggatatttgtcccttcaagtactcctgatactttccatgggttgaggtagggacaggtcttttgtcaggaacccaaggtgatagggaagctggttgtcaaccttgatctcactttagaattctagtgaagaaaccatgagttgggagaaatattttcacatgcttggtgcaaggcagattgtggagagaggagtcacggatatagaaatctgatttcctttccatctgcttggagttttttcccttctccatgacctgggaactgtctcatcctcatctttgggttctgggttattgctggtaataatctcagtaatgtatgtttgtttttagttttctgttatgggagcatgaagccagcttgcttctatgctggcattttggaactggaagacagcatgaagttcttaaaagcaatttttcaacatatatgaaaaaatttaaattattatttttggccaaatgtggtggctcatgcctgtaatctcagcactttgggaggctgagatgggaggctcacttgagtccaggtgtttgagaccagcctgggcaacatagtgaaaccctgtctctacaaaaaaaatttttaaatttgctgagtgtggtggcatgtgcctgtagtcccagctactctggaggctgaggcaggagaatcacctaagcctaggatattgaggctgcagtgagccgtgattgtgccactgcactccagcctgagtgacagagtgagatcttgtttcaaataaataaatatgtttaaatttagtaattgtagctctaagaattatcttaggaactaaagagagatatacattaatgtctgtataagtatgttcattttagcattgtatttaatagcaataactttggatataccttaagtatcaacagtaaaagaattattaaattcattttaacacatctatatgtatgttatatagctattaaaactgatattgaagaaattttactgacatggaaaatttctcaagcatatgctgagggggagaaaagcagtgtacaaaattatatctcaattcaattatcaatatctaaattcacttctaaacacaccatccatagaagtaaaaggatttaagaaatacaccaagatactttcacttctgggaaggtggtgacatactgtcttttatgcctcctgctaagtacaactaaaaactttggacattatatttaaaacaaactttaaaagactctgaaagacggagagaagaaggcagaccagctgagggccttgagacacaaggaacagcatggtggtgagtttcctgggttttctttttgcctcatatatcccatagcaaacatatataattttccttccctccaaagaatttcctttaatggttcttgcaagacagatctcaggcaacaaattctcttagttgttatttgtctcaaaacatctttatttcttcttcacttttgaaggataatttttgcaggttagtgggttttttctttccacattttaaatatttcaattcattgtcttcttacttgcatagtttctgaaaaaaaaagttcaatataattattatcaataggtaaggtaattttttttctccctggcttcttgcaagattttctctgtcttttgtttttcatagtttaaatatgatatgtataggtgtagggttttgttttgttttttgcatttattctggtcagtgttctctgaaattcctgaatctgtagcttggtgtctgtcattaattttgggaaattctcagccattattactcaaatatttctttggttcctttgtcccttctcttgtattcctataagtatgtcacactgtttataactgaatattctgtactgttttgttcattctcttttcatctttgcgtttcactttgaggagtttatattgacatttcttcaagatcactgattttgtttcattggccatattcaatatattgataagcctatcaaagacattcttcacttcttaaaacaatgctttttatttctagcattttctcttgattctttcttaaagtttaaatctctctgcttacattacccatcttgtcttgcatgttgtccacttttttcattagtgcccttagcctattaatcagagttattttaaatttctggtctgataattccaaaatctctggcatagctgaatctggttctgatattcgctttgtctcttcagactgttttttttcttgccttttagcatgcctcatcattttttatcgaagcctagataccatcattatatcattgggtaatagcatttaagataaataggccttcagtgtgagggtttatgtttatctgactaggagttacactgtgtttactgtttgctattaatgttggcatctgagagtttcctccagtatcttttttttttttttttttttttagacggagtctcgctctgtcacccaggctggagtgcagtggcgcaatctcggctcactgcaagctccgccttccgggttcatgccactctcctgcttcagcctcctgagtagctggaacaacaggcacatgccaccacgcctggctaattttttgtatttttagtacagacggggtttcaccgtgttagccaggatggtctcgatctcctgacctcatgatccacccgcctcagcctcccaaagtgctgggattacaggcttgagccaccgcgcctggcccagtatctttgtttttatcaccccttttgtctcttgttttgtctttgggtttccttagaaaccccttcttaaaaagagtctgagctttgcagtctttcatctataatcttctgttattcaggggctctgtaaatgtggtggtaaagtgtgtgtagaaggaagcattctatactctataattaggtgtcagtcttttggtgggtctttgccctgggctattaccttgacaagtttttctcagcatttcctccccttaagtgagagaggaaggttagagtgggctgaagttgtctaattgcccttctccagctcagataaggctttggttagacattttcttgagagcttaccttcattacagagaacggaacgaagaacagaacgaagaacagaactctctgggaatattccaaaatagctatttccttctctccctgctggaagcagaagcggattctctgatcttcacagtgagaacatgttggggctcttggaggcaaaactcacaaaagtgtgggaccctctaagattctcctccctgcccccaagaatttttaactctcaagctagtccacactgagcctcgagaaatttgtcaattagagctgaagcgttcttgtcagtgtaggttccaacagctgacttctgctctcaggcttctgctccctgcaagctgtgatgctttataatactcctctctccagttttcaggacagcagtttaccctgtgatctcaattctctgatagatataagaagagttgttttcatttagcttttttcttgttgtgagaataggaatgacaacttccaagctcattacatgttggagtgaaactagaactccgtaagttgctttttaatgataattttgcaaaagtgggtatcacaatagaatcaagttattgagttgtattgagttattggtgggtgagttttgttagtcctaattatattgataatcttaaagatcttgaacttgctttcaaattaaaaattttaagacataacatgacacacaagtactcattcttacaattttattttttttacattgctctcccatggaactatccactgcttaataaggaaaatgtttaaccacctttgatatttaaatctttacaactatataaaatagcagagatttcaagaatataagtattaatcacttagggaccatcattttgtatatatttaacgttggttatactgtaatttgattttattaaacaaaatacaacattatgtattttcttttaccaagaatgttttatagtgcaataattctgtcagttgttaatcatataaactcagccagaaatagagctttttattcatgctataatggtctttatcagacttggaaattcttatgcttaataaaacaactgcagttttacagtggcaaaaataataaagattggtttaatttattgtaattaccaatagaatatttcctataaaatataagcttaattaggaagcattgttttaaaattacaatttgaaaagcttttaaaatagcaaatttgattttaaattccatttcttcttacttaggttacttccaactgtaattgatcagaaatcatttattttccctcaggaatctgagggtacattttggcaaccccaaagacagcacagttcatctctgcctgtctttccaagagcaaaggtaggtatagagaaattcatagagacagaaagtagtttagtgattgccaggggctgggaggagcagagactaggagtgacttttaatgggtatgaagtttctttgggggacaatgaacatgttctagaattatatagtggtgatgattgcactactctgtgaatatagtaaacaccattgaattatatactttaaaaatgtgaattttggctgggtgcagtggctcacgcctgtaattccagcactttgggaggccgaggtgggtggatcacaaggtcaggagatcaagaccatcctggctaacatggtaaaaccccgtctctactaaaaatacaaaaaattatccgggcgtggtggtgggcgcctggtactcgcctggtactggtggtggtactcgggaggctgaggcaggagaatggcgtgaacccgggaggcggaactttcagtgagccgagattgtgccactgcactccagccagggcgacagagcgagactccgtctaaaaaaaaaaaatgtgaattttatggtatattaattacatctcaatgaagctgttaaaaactttttaaaagagtaaagtaagaaatttgctttgtgttctaagttagaaaacataatgtataggtctgtttctagaatttcattttatagttgtttcagatatgttcatggcatggtcaatttctacaacaaaagagctttcttcagaagaaaataaatcaagacataataccttcacattttttaacagagccaggtggcaaagaatagagctcaagaagtttctgactttgcctccattgagtgttctctcaattctgttttgtccctgtcttagctcaggctgctgtaacagaataccataaactgagtggcttaaacaacagaattctatttcttacagctctagaggctggaattcaaaggtcaaggtgccggcagatccggtgtctggtgaggtctttcttcctagtttgcagacagttttcttcatttgtttcttcacatggcagagagagacagagagaaaaccagcaagctcttgtgtgtctttttataaggacattgatctcattcattagggttctaccctcatgagctaattatctcccaaaaacctcacctgctaataccattacattgggttaggatttcaacatatgggttttggtgggcggggggaggcggggcacaaacattcagtccatagcatgccctgacttaaaagtaatactagctcacctcttttgggtagcaggaactgttagcagtactttgaaaatactaacttgtttgaacttcagaacaatcctagaaggaggtgttattattattattattattattattaagatggagtttcactcttgtcacccaggctggagtgcagtggcacaatctcggctcactgcaacctctgcccctcaggttcaagcaattctttgcctcagcctcccaagtagttgggattataggcacccaccaccacgcccggctaatttttatatttttagtagagatggggtttcaccatcttggccgggctggtcttgaactcccgacctcttgatccacccgccttggcctcccaaagtgctgggattacaggcatgagccaccgcgcgtggccagttgtatgactttttaaatgtctgtcttcccactagattataagcttaatgagggcagtaactgtattagtttgttcattactatattatgcctagggtgtgggccataggctcttgacctcctaaaagtttgctcaaaatcactaacatgaggcagattgattaattaggagaaaaggcatacaagtttatttaacatgtatacacaggagccttcagtatgaagacccaacatcctaataagttacagaagcttatatatcatcttgaggttacagaaataatgggggtcagggcatggccaaaaccaggttatgtttataaatcaggttcagtggcaaaacaggttataagagggagaaaggaagaagcttggctagcaaagatggccttgtgtgtagatgcagcctccttcagagagaatagatggcaaatgtttcttttcagtcgtttaaaggtatcagactcaatctctcccagatccaggaaatgactggaaaggggaggccttggcagcattggtggagattctctacagaagcaaaatttccccacaaaagacagctttgcaagaccacttctgtttgctggccctgtggcaactatttcaaaatatgtcaaagtacatattttggggtaaaatatttttatttccttcacagaggattctgcataaatgtttgttgaatggataaacaaaaccaccacagtgatctctaagagtgtgctcatctgcatgtaaaatatcagttcaggctcctgtgaactcccaaagcagccctctcctatctctgtccttgcacttgttacattgggtctgtcagccactctctgaggagtgcttactgtgtgcccaggattattagaggcacgctgggctgaataagacagatcagatccctgacatcagagagcttatattctagtggggaaagacagaccatcaataagataccaccagataatgataaaagctctgataaaaataaaacagaatgctgtgataaagggagcttaaacttctcatcttccttactgttaaatcacttcttcagtcatttttttacctgtttgccaagaatctcagaaggtccatagttggtcccccagaccagagattagatggaggtatctgatttataagagcaatgaaataaaatatatgaaattaggctattttagaatgtataattgctattattgttctgggaaaaaaaaaaacaactatggccagaaatttatttgccccaaagagctctgaatcctggctaatgttcatgaagatgcactgtgttcttttaaatgctatgaggatgggtgagcttcacttaaaaagtggcatggactatttcctaccctgactttgcctccagagcctggattactattgttgttgtatatctaatatgtgtgacgtctgcttaaaaatgcatatcctctgacacaaaagatagccctaattttgcactgtaaagtcaaagacagacaatgctgtcttaccagctgttacacatgcctactacaccaacataaaagcttatattattaagtagttatgaaatccaactgggatattactacctttaattgcccacttccaaccttttaaaccaggtaaaccccagtcacttctttaagctctctctcaccaaaagtggatagctgtttttgaaattcacatcaaaaagcttaaatgacaaacagttaggagttgctcaattgtaattaagaatcgtaatttagaattgtttattaagcctcttttaatttgaaaaagcatactcagaaacatttacaatttaaaaaagaaaggttacactaacctttcactttctgaggttttctcttgaaaaaaatagaatcagtgatgaaatatcagtaagtagtattggaatataaagtctaattttcagaatttgctgataactggcgaaatcaatatggactccatttttgcttattaaaatactaatttttaattttttcctccaaatttatcagtaatacatgcttcttgttgtgacaaacataatatgaagatgtaaaggcaaagccagttgttgaacccccactctctaccaaactacccaatcccatgaggcaaccagtgttaacagcgggttgtatttgtccactcattcccctttgtaataatgtatatacagtacaagtacgtatgcagatatgtagggtttgtgttggttatgaatttttttgcttttactgaaacagataacattttgagtcatacaaataaagaccatttttgttcacaaatgctatatatgaagttatgttcatacaattattcacataaaatatatgctattttatgtttatcaaatgggataaaaatgtaacatggtgtgatatttctgagttttttttttctattgactatccgtgacaacaaaagagggaaagtgggaccatgtacgttctggggttgagtctaaagagtccaaagtaagtgggaaatatctttgatagctcatgctttggcatataaattatagcaatttttcactccatttcattatatatccatttttgtttcgatataaaagtaatggattttacttcaaaatatttagataaaactcatgccccaaataatatatctcttgtttattatgttcctatcatactaccacatactcccagtagtgccccaatttgagatgcagaggattgtacagcatcagtttattcatttaccaaacattttcaaatttttatttatttcatttattttattttttatttttgtgagtacatagtgggtgtacatatgtatggggtacatgagctattctggtataggcatgcaatgcatgataatcacatcagggtaaatggggtagccatcacctcaagattgcatttatcctttgtgttacaaacaatccaattatactctttagttatttttaatgtacagtaaattattactgactatagttgctctgttttactatcaaatactagttcttattcattctttctattttttgtacccattaaccatccccacttccccctaacccacactacccttcccagactctagtaactatccttctactttccatcttcatgagttcaactattttaatttttagctcccacaaataaataaaaacacgtgaatcatgtccttgtttgcctggcttatttcacttaacataatgaagtccagttccatccctgttgtagtaaatgacaagatctcattcttttttgtggctgaatagtacttcactgtgtatatgtaccactttttctttatccattcatctgggttttttgttttcttgtttgttttaaacttttaagttcaggggtacatgtgcagatttgttacataggtaaacttgtgtcatggggatttgttgtgcagattatttcatcacccaggtattaagcctagtacccattagttatttttcctgatcctctcccttcttccaccctcctccctccaataggacccagtgtgtgttgttcctctctatgtgtccatgtgttcttatcacttagctcccatttataaatgagaacatgtggtattttctgttcctgcattagcttgctaaggataatggcctccagctccattcatgtccctgcaaaatacatggtctcattccttttatggctgcatagtattccatggtgtatatctaccacattttctttatccagtctattattgatggatatttgggttgattccatgtctttgctactgtgaatagtgctacagtgaacatatgtgtgcatgtatctttgtaatagaatgatttatattcctttgggcgtatacccagtagtgggattgctgggtcaaatgctatttctggttctagatctttgaggaattgccacactgtcttccacaatggttgaactattttacattcccaccaacagtgtaaaagcattcctatttctctgcaacctcgccagcatctgttgtttcttcacttttaaataatcaccattctgactggtgtgagatggtatctcattgtggttttgatttgcatttctctaataatcagtgatgttgacctttttttcacatgatcattggccgcatgtatgtcatcttttgaaaagtatccattcatgtcctttgcccactttttaatgttttttttttctcagaaatttgtttaagttccttacagatgcatcctttgtcggttacatagtttgcgaaaattttctcccattctgtaggttgtctgtttattttgttgatagtttcttttgctgttctggagctctttagtttaattagatcccatttgtcaatttttgttgacaaaaattttgttacagttgcttttggcatctttgtcatgaaatctgtgcccatgcctatgtcctgagtggtattgcctgggtattcttctagggtttttatagtttggggttttacatttaagtctttaatccatcttgagttaatgtttgtgtgtggtgtaaggaaggggtccagtttcaatcttctgcatatggctaaccagttatcccagcatcatttattgaatagggaatcctttccctgttgcctttttttgtcaggtttgtcaaagatcagagagttgtaggtgtgcagtcttatttctgggttctctattctgttctgttggtctaccagtaccatgctgttttggttactatagctttgtagtataatttgaaatcaggtaatgtgattcttccagttttatcctctttgctcaggatagctttggctattctggctcttttgtggctccatataaattttaagattgttttttctaattttatgaagaatgtcattggtactttgatagggattgcattgaatctgtagattgctttgggtactatggatattttgacaatattgattcttccaatccatgaacatggaatatctttcccttttttgatatccttttcaatttcttccattaatgttttgtagtattcattgtagagattttttacatcttttattaattcctggatatttaattttacttgtagctattgtaaatgggattactgtcttgatttctttttcacattgttcgctgtgggcttatagaaatgctactgatgtttgtatgcttattttgaatgctgcaactttactgaacatgtttattagttctaatagttttttggtggagtctttaggtttttccaaatataagatcatatcatctgcaaacaaggataatttgacttcttcatttccaatttggatgccctttatttctttctcttttctgattgctctagccaggacttcccattctgtgttgaataacagtggtgaaagtgggcgtccttgtcatgttcccaaacttaggagaaaggctttcagtttttccccattcagtatgatactagctgtgggtctgtcatatatggcttttatttatttatttatttatttatttatgtatttatttattgagtagagtctcgttctgtcgcccaggctggagtgccatggtgcagttcgggcttactgtcacctctgcttcccaggttcaaatgggaacctgcctcagcctcccaagtatctgggattacaggcgcaggccaccacacccggctaatttttttttgtatttttagtagagatggggtttcaccatgttggtcaggctggtctcaaactcctgacctcaaatgatccacccaccttggcctcccaaagtgctgggattacaggtgtgagccaccacgcccggcctatatatggcttttattatgttgaaatatgttccttctatacccagtttcctgaaggtttttcttgtgaaacgttgttgaattttatcaaatactttttcagcaccaattgaaatgatcatatggttttgtcctctattctgttgatatgatgtatcacattgattgatttgcatatgttgaaccctccttccatttctgggataaatcccactggtcatgatgaattatcttcttaatgtgttgttgaattcagtttgctaatttttttgagatttttgcattaatattcatcagggatattggcccatagttttttctctttttaatgtgtttggtctggctttggtatcagggtaatactggccttgtagaatgagtttggaagtatttcctcttcttctgtttattggaatagtttgagtaggattggtattagttcttttttaaatatttggtagaattcaacagtgaggtcatcgggtactgggcttttctttgctggaagatgttttattatggcttcagtctcgctacttgttattggtttgttcagattttggatttcttcatggtttagacatagtagggtgtatatgtctagaaatttatacatttcttctagattttccaatttattggcatataattcctcatagaagccactaatgatcttttgaatttctgcattgtattatctcctttgtcatctctgattttatttatttgggtcttctttttttcttagtctggttaaaggtttatcagtttgtttatcttttcaaaacaatttttgtttcattgatattttgtactttatttcatttatttctgctctgatctttattatttcttttcttctgctaattttgggtttggttttctcttgattttctagttctttaagatgtattgttaggttatttatttgaagctttcctttttttggatgtagttgcttatagctagctataaacttccctcttagcattgccttcactatatcccacaggttttggtatgttgttgtgtttctattatcttttgtttcaagaaatttttcagttttcttaatttcttcattgacccactggtcattcaggagcatattgtttactttccatgtatttatgtagtttccaaaattatttttgttattgatctctagttttattccattgtggtcagagaaaaagcttgatgttatttcaatttattttgaatgttttaagacctcttttgtgacctaacatttggtctgtccttgagaatgatccatgtgctgatctgcacatagagccttctgcagccatgggatgaaatgttctgtaaatatctattaagtccatttgatctgtagtgcagatcaagtctgatgttcctttgctgatttttctgtctggaagatctgtttaatgctgaaagtggggtgttgaagtctccagctcttactgtatttgggtctatctttctctttagctctaataatatttgctttatatatttcgatgatccagtattgggtgcatatatatatttatttgcaattgttacacgtttttgctgaattaacccatttatcattatatagtgacatttgtctcttcttatagtttttgtcttgaaatctattttgtctggtatagctactcctgctcttttttggtttccatttacatggaatatctttttccattcttttatttttagtctatgtgtgtctttataggtaaaatgcatttcttgtaggcaacatatcattgggtcttgtttttgcatccatccagccactctgtgtcttttgattggagagtttagtccatttacattcaaagttattactgataactacgttaggtactcttctaagcactggaggacttgtctttgagaatatgttgagggagatagacaaataaacatcatctgagacagaaagaagcactgtgggctacagaatcaaagagaaagggtgggcttatgcaaacttggtcagggatgcgagaggctttacaaaggcaatgatgcctgggctgagtctcagccagctaagatgagagaggagaggtgctcacagtggaggaaatatgcaaatacatggccataaacaagagcatggcttatctggggggaacccaatgagttcctcatggttaaaatgtagacagtattgtttgaggacaatcaagagatgaggttgaagaagagataaaggaaggctagataatgatgcagcttgctaagattctataatgtgaaagagtttgaatttacattagtgacaaagagaactatttataatttttaaatagtgaattagagaatgacatgatcataatagtgatttgaaaagattgttttgtcagcagtatggaaaaagagattggagtaggaggtagactctgggaacttcatcaaccaatttgtggtaatccaggtaagagatgatgaaggtctgaattattgcagtgatcatgggcctaaagaaaaaaagacagtgattagtagtagaactaacacgacttgatcatgggggattaaaaagagaatgagagagtgagtgataacccacaagtatccagcttggagactgggtgctagttacaccattcattgagatgggagacataggagaaggagcagatatgttgaggtgatgattggagtaggcaaataagattaattcagtttcatacagtgttgaatctgagatgcttgtggacccttccaagaggaaatgcctaacaggcagctgaatgtacctacacgtagtatggaggtcagaagaaatatctgagaataagctatagatttgctcttatcaacatttaggggtggtacaagtcagagaagatgggatctctcaaagagaacatcaagtgaaaatgatgagtaatgtagttgaagtttctgtatcacaaatcagtaagagattttcaggtttaaaaacataatttttaaaaccaaacaatatatattacacaaactttcatgtaacaaagtttgagtctaagcctttttattcacagtctagattcttccaaatcacttttggccatttgacatcacgtgcagcatcatgatgacagactgttttttaacaactctgacttgtgaagttgaatcttttgtcttcattcgactggtaatataattctggggcatagtgaaaaataatagggtttcttttcattgtcttatttggtccacgtcataatttcatattttccgtaacttaattcccagccctgaaagttaaacaccttctcctgaaaatcagtggaaggcttctgtcagagcttttcagtacctgaatgattatataaattggtgacaccagctctccatagctttgaaaatcctagagtctattccatgagatttactatgctggtttatatcataatttctgcatctgtaataacttttttattttaatgctgcatcaaaatgtaatcttttaaaaggtgttttaagcaaaaatctctgcttaaattttaagcacctctggtacttctaggacacaaaattcaattgtggtgatgatgttatgaacatattcttattcatggctagtctgagttgcacaattgcatcacagcttactcctgtgggtagtgactggcaagattcttggcaagattcttttgacatcacatgtaagaaaggctgatttcagaaatgttaaaacttgaaaacatttttttgaatagaagaaatacagcacatatcatacaaggctttacgcttaacctaataatttcagtgttgaaagaattcttggagattttattttgtaattttgaaggcaattaaattgtgaaggcagtttgtgagacagttcagattattcaacaaactttgagtgtcaaatttgtgccattcactgtgcccagctctggaatgcagagatatataatacagcatgatccctttccacgtggaatttaatatagtggccttccttgggagccttggggaatgcagagagacttctgggtttgttacaatgtttttggagcactgctggcctttagtgggccaggaacactaaactttctatagtccataggattttctgcacaagaagagctatatctctcgcagtgttcatagaatccactctggaaaacactgcagaagacagaaacacaatcattattcatgcaagtccaaccactagggaagggacatactatcactgtgttgtaactgtctcattctagacaatacctattgttcagcttggatacctaccttgtttgccagatgtaactcagaataatttttggcaaaagcaaaaaggtgaagccattctaaagaatgtgatgtaggcagtctaaaaaacgagttccaaaaattggaataaatgcatagtttcccaaatagcacaatacctggcacatggtaaagtgctcaattatgggtattattatgattattaacctaattctagaatttcctggaatctcacattttgaagggacttcaacagtcatctaattctagccaggataaacaccagctcaccccaagttccttaaaattgatgccttaacaatcaaacataaaaaaaatactgtgctctagtatgatacagcaatgtacatttgtatctaacctggaaagaatctttaattttgtgaattttgatctaattaagaaaggtgattttcaaaatttcacccaaacgaaagttttgaggatttttgacattatgtggcataatatggtaaaagatcaaaaatggaaaatatcagagcaggcaaaggttccttcagaaattttcactgtaagttatacctctatcagggtaaaaattttactgatgagatggcaagttggattttatagaatagattggagagaagagaatgcctacaaggatccactgtgagttctgccctctcattagaatgtaagctccatgagagcagcgactttttgaaaatatttgtttccttttccatggcttctaaaaaccctttttgtatgaaaatattcaaatatactttctatagactgaatgtgtgtgtatgtccccaaaattcatgttattaaataaaacctaatgcacagtgtgatgacattttgacgtatggactttggggagtgcttagctcatgagagtgaagccctcatgagggggattagtgctcttataaaagaggccctagggagcttccttggcccctcttccatgtgcagacacagtgaaaagatggccatctatgaactgggaagcaggccctcaccaaacactgaatctaccagtgtcttgatcttgaacttcccaggctccagaactgtaagaaataaatgttgttgttgtttataagccatccagactctttttttgagacagggtattgctctgttgccctggctagaatgcagtatacaatcatggctcatcatgcagccgcaatctcctgggctcaagcagtcctcctgcctcagcctcccgagtagctgagactgggactagagctgcatgccaccatacctggctaatttttaaatttttagtagtagcaaggttttgttgcccaggctggtctcaaacttctgagctcaagtgatcctcctgccttggcctcccaaaatgctgggattacaggggtaagccagctcccaggcttcattatagcagcccaaaaagactaaaacagtatgaaaaaataacataaataaccacttctccatcacttagattgaacaattgttaacctttaccatttttgcttcatctatttttattgaagtgttttaaaataaaataaaaacctaatgacatttcaccccttaatgcttttaacatgaatcttcaaaaatgaactgtttctctttcactcacaatatctttatctcacctaataaaatcaacagtaattcttgaatataataaatttccagttcatatttagattgccccagttattccccaaatgacttttactcctctctttccagtcctggatctgttatccattgcatctgattattttatttctaaagcagagggactctgcttagttcattgctgtaactagggcctagacagtgcctagcctggagtaggctctcagtagatgacagcatagtggttagaactatgggttaacatcctggctctatcacttactagctatacttgggcaagtcacttaacctctccatgcctcaattcctcatctgcaaaatgggtttaacagtagtatctgttgtacagtgagtgttgtataagtattattgttcttatttgttgataagtactaatcaacctctattatgtacctaatacatgttgggccctattttaggcatcagccacatttctctgctctcatggagcttacattctaattgaggctgagtagtcattaggaaaacaaaaaacaatttgaaaagtaaacatccagttgtccctcactattcgtgggggattggtcccatgatctcccttggatactaaaatctgtgtatgctcaaaaccctgatataaaatagtgtaatatttgcatataacctatgtacatcctcctgtacactttaaataatcgctagattatttgtaatacttaataccatgtaaatgttctgtaaatagtttttatactgcattgtttagaaaataatgacaagaaaaagagtctgtatatgtttggtacagatacattttttaaaaaatatttcgaattcaccgttgattgaattcatgaatgcagaacccatggatatggagggccagagtgaatagcatgttagttggtgagagaaaagctgggaaaggaacatagggactattgggatggtctaacttgtaaggtgacatgtgagcacaaatttgatggctctgaaggagcaagtcatgtgcctccttggaggaaatgcatcctagacagaagaaagaccctaaattatgagtgtgaatagcaaagaaggggagggtgcaaggaagagtgaagtgggaaaagtaggaggggccagatcttgtagaccattgtgagactttggatattaccgagggagatcgaaagttattggaggctttcaccagagaatatgacttgcaatttgaaaggtcccctatagatacagtagtgaatggtataatagagttttggaaaacatgctcttgtagagccagagggtatgcctaatgcctgggctttgatgtaaccattaagggcatcatcttgaaaatctttttcaagcacagcagtgtgacctctgcatcctagactgccagctcacatatagtatgttcttccaacaatttttcaacactatgaggaccttcaacccattgacctctcattatttcactatttatcacttttgtcttattgtcttttccttctcagctagattagatgccatggttgtggcagaaattgttagttctctgcccaatatctatttccttgcctatattactaacaactgattttgctcaggatggcgttatatcataaggaataagattcctcatttctgagccttcctcaaagcaaaatatttccacgtgtcccagttctgtccagttagtaccaagcagcagtctactgggggttagttccagggaatattttgcttttctaataaaggggatagtcacagctggcatgttcctttgcccctatttccctttctcctttcttcctcccttaaacacagatatgacatctggagctgcagcaatcatcttgcaaccatgggatgacaagcatggacaaaaggcaacaccctgatgattgtagagcagaaagagagaaaggaactgggcccccagtggcttctctgagcagctgaactaatgctagcaattgactacctctgccatgtgagaatagaccccagtagggttttctgttatagaatgtcagatctaactgattcagtggttcagcaccatggtctctttcttgcaaacatccttatccatcttcccctccatcatgcctgggagacaaaacacaagtctggttaaacctaaccaactgctctgtgtttgcatctgagtagctaaatatagctgcagtacatctcacaatggtgcttaggggtctgactttaattttatgaccccaaatttcaggtgggcactaaactcagccgataagtgctatcacttttctgtagcaaaatcactttcttatcccttgagacggctattttaaactttctcctctttcttcatacctccagcacccttgtctccccttactttcagctgatgatctctcttcatactcgctgaaaaaaataaatgaaatcagatgagtgccacctcattttttgtgtcagagtctgctagtatccccagtattcctctccctctttctttgtaataacacctttgatctttttagctagaaatatggctgtctcatgtaaagaccatattttccagcttcctttgcagttgattatagctatatggccaagtactggctaatgaaatgtaagggggagtattatgagtagctttcaggaaatgttctaaaaacatagaactggcttgtgccctttgatcgttttcttctccctcctctcttttgctatgtgggatgagtctatgatgctggaactctatctagcagccatcttagaccaggaagggtaggtccacatattgggatagaagagtactgagctaggaggcgtctgctccttaagaattttatgacttccaaatcaaccctgaacaacctacctctggacttcaggtacatgagaggactaaattctgtcttatttaaacaatattcttctagtttttggtcacatatagacaaatgaatcctaactaaatgcatcagtctttctaggtcaagatgtatattctgtgccttctctctaatcataatggaagtgtccctttcctattaaggccagcctcttattaaggccttagtttctacagttatttcctctcatgaatcgtcagtttctcactcctcagtcatttagagatctttgcataactagctcagtttcatcactctggtcttagtctaattgttgtctcctcagagaggctgttcttgaccaccatatctaaggtagtttcctcttattctctatcccattatcctagtgtattttatttagagcatttagggcaatctgaaattaattttatatctgtttatgtgcttattgtctgattcctcacataccttcaagaaagtaagatccacatgggcagggacttcgtctgtcctgtttctaaaacctactaggctctcaagaaatgtttgaatgaatgaatgaattctgttaaagaaagagagatagaggttggaggagacctcccagagtaatttgggcctgactgaagttcaagtttgaataaaagtgtgaccagaagacactgaagagggaagaggaagacattcgcagaagagggaacagcatgctcacttgcagaggtggagagagcgtgttgtatgtggtcattggtcattcagcatgaaaagtccacagagctgttaggaaggaatggcaggaggcggagctggaaggaatgggtcagattacgccaccctaagggaaactggtggaggattttaaaggtgagagacgtattggattcagtgattagaggcaggccatcatgcagaagatggattggaagcaaagagacccatctgagggaccattaaggaggtctgtgtaataatcagtgaagcatggaccaagcagtgcctgtggggactagagagggtaaagaatctgataggatgataggaagttgaatcaagagtccatcacctaacatttctttataatgtggcagtatgttgtgatgaaatgaggctttggattcagagatgtaaatcaaatcctgtctcctcaattccagattgtgtgaccttgagaagtcacttaaccaattatcctcactggcaaagtagtgacaatatcatatacttcctcttgttatttttaggactcaaatcagttgactgtgaccacactcacctgttctggtgcttggcacaaaatgggacctgaataaatgttagctctctcccctaacccttctcttattctccaattcaactcctgtaggaatgagaaaacggattggccacatctgaatagaagtaggtaagcctttaggttttgtgaacctgaggcagttaggcagcagctgggctgtttagaagcagcatggagttaagtgatgctgtgattgtggagggcttctactttgttgatccttctagccctaacagggagataagaggggaggtaatagagcatagaatgttagagctgaattaataataaaataatgaacaattacattttaattacctcttaattttagttgacattttattaagaaaatgtatttttgaatagacgcaaaaatccatatagccatctcccagctttagcagttaacataatttttccattctaatttcatctattccctctactatttttggcaaagtctttgaaagcaaatcccagacatcatatcatttcactttatcgtatattatttggtaaagattttttaaaataaccattatcacctgtaactagtgagaatagaccccagtagcattttctgttatataatctcaaatctcttctgattcaatggttcagcaccatagtctttctcttgcaaacatccttgtccatctttccctccatcatgccgaaaacttaacaacaattcactaatattgtataattcccagtccatgcgcaattttccccaattgtctttaaattgtcattctactattgtttgcatgaaacaggatgcaaacaaggtccacacattataattgtatttcattttacctaaacagtttccctcgtttaaaaaatgtcatttaaagatttcttgagtaataccctacaagcacaggcaaacaaagcaaaaatggacaaatgggatcacatcaagttaaaaagcttctgcacagcaaaaagaaaccatcaacaaagagacaacccacagaatgggagaaaatatttgcaaactacccatctgacaagggattaataaccagaatatattaggagctcaagctactctaggaaaaaaaaattctaataatctgattttaaaatgggcaaaagaggctgggcacagtggctcacacctgttatcccagcactttgggaggccgaggcgggtggatcttctgaggtcaggagttccagaccagcctggctaatatggtgaaaccccgtctctactaaaaatacaaaaattagccaggtgtggtgtcgtagcctgtaatcccagctacttgggaggctgaggcaggagaattgcttgaacccaggaggcggaggttgcagtaagccgatatcacatcacttgcactctcagcctgggtgacagagcaagactcggtctaaaaaaaaaaaaaagatctgaattggcatttctcaaaataagacatacaaatgacaaacaggtggcttaacatcactgatcatcagagaaaggcaaatcaaaactacaatgagatatcatctgacccactaaaatgacttttatctaaagacaggcaataacaaatgctggcaagtatgtggagaaaacagaaacctcctacacagttggtaggaatgtaaattaatacaaccactatggagaacggtttggaagttcctcagaaaactaaaaataggccaggtgtggtgtcttactcctgtaattccagcacgttgggaggccgaggtgggcagatcatttgaggccaggagttcaagaccagcctggccaacatgatgaaacccgtttctactaaaaattacaaaaattagctgggtgtgttggtgcatgcctgtaatctcagctacttgggaggctgaggcacaagaatcacatgaacccgggaggcagaggttgcagtgagcagagattgtgccactgtgctccagcctgggtgacagagcaataatctgtctgaacaacaacaacaacaactaaaaataaagctaccatatgatccagcaatcccatttccgaaagaaaggaaatcagtgtatcaaagaggtagctgcactcccatgtttattgtagcactattcccaatagccaagatttagaagcaacctaagtgtccatcaacagatgaataaagaaaatgtggcacttacacacaatggaatatattcagccaaaaaaaaaaaaaaacaatgagatcctgtcatttgcaacaacatggatagaactggagatcattatgttaagtgaaataagccaggcatagaagggcaggattcacatgttctcacttatttgtggaagctaaaaattaaaacaattgaattcactgagatagagagtagaaggatggttaccagaggctgggaagggtagtgcggggcttggggagaaggggggatagttaatgagcacaaaaatatagttaaatagaatgaataagatctagtatatcacaacaaggtgacgctggctggtcactctgttatactcaacaataatttattgtacatttaaaaataaaagtgtataactggattgtttgtaatacaaagaaaggataaatgcttgaggtgatggatatcccatttcccctgatgtgatgtaattattactcattatatgcttgtatgaaaatagctcatatacctcataaatatatatacctactaggtatccacaaaaattaaaaataaaaaaattttaatgtcaattatttgttgaagaaaccaggtcatttgtcatataggttcttcccacagtctggatttatctgattgcaatcccatggtgccattttacatgttcctgtctccctagtagctcttctaaactgttagttttatctggaagcttgattgtattcagattctgtctttttggcaggactacttcatattttacaatggtgctgtacccagtgcctgtgtattttcttttatagcatatcaagacgcaatttctttttttgtcttttaataatattaagactgataaatgactccaaggattttcagctgaatttgtcttttataaaattctctacaacctttcacttaatgatattagcaaccattgatgtttactttaatacgttatttcattaggaattacaaagtagtgatttttatatttctatcattcctttgcatttttttagcctctatgaggaagttttccttagcaactctttggtgactctgaaaaccagttttaattacttacttttgcttaattcttttatttatcaatttttaggttaatttatcaattttatcaactaggtttttgaggggaagggagtattattaagaactcatggatttttatatgtttgaagtgtttcaatccacagtaatcattattttggggccagtgggagcctctttcacattggctccagaatagtactttataatttacaagatacttaccatacattagtcatttgaacttcacaaacaaccctatgaagctaagggttactacccagttttacaaatgagaaatctagatcatacagctcaaatcaggacttgacgtctattgttcttcatattacctaagacagtggttgagagaatgagtgttaaaagtgactaaattctttgtatttttcttttctctgcatttgagactaaacagcagctgtctttaaccagtgggaatatgatattaagcaatatccactttagaagacactacttgcaggaaacactgtcgataatactgtaacttagtaaatagcctctctcaactttgtttgtgaagcatttcaattttgattactctgtgtgggatctactgctcagatgtgtgtcattttatggtctacccatgtctggggagctggcattacacgctgcctagtgtttttaattcagaagttgttctaaaagaaaccttagcctcctatattccaaccctagttttaatagcataagctatttccttcttatatagctttgtgggcataataatgaaataaataccacagaatcactgatgagatgaaaattgagctccctgcttctgtgcagccatgtaggtaaaacagtaattggctctgataataacttttgttcttacaaaccagagtctaaatgagagtcacatttgatatatctgcttgtaattaccatcaaaaggaaagaatacaaagtttagattgtctagtgactcaagatggattacataaattggtatcttttcttgaccaatttactaaaaatttctgaaattatttctgatatttatcttactgttggtaaaaaatgatcatcttccagagcatactttcctgcttaatggaatgattaattttatttttgtttttgaagtctgtaattgattttcttgaaaaccttattattgagtctcataatacagctatgcttataagtattttcccatacatcactatagatggttcgtaagacaaatttaggttttgaatgtacttggtagtgaatttcagtgaaacatttgttatgttaagttttttttttttttttttttttttttgagaccgagtctcattctgttgcccaggctagagtgcagtggcatgatctcacctcactgcaacctccacctcctgggttcaagcaattctcatgcctcagcctctcaagtagctgggaccacaggcgcacgctactacacctggctaatttttgtatttttagtagagacggggtttcaccatgttggccaggctggtctcgaactcctgacctcaaatgatccacccacctcggcctcccaaagtgctgggattacaggagtgagccaccatgcctgtatgattatgtgaatattctttaaacatagattccttttaagtgtttttgaaaagagcaattaaatcatgtgtgctacatattactattttggtatacacatgcattgggaccaaaatagtaaatatgagaatattaatattttaaaattatcttttaacctcaaatgattgctttcgaacccaacaataaagaattgatagtacacctatcatttctgttggatttctatttacatactgatttcttttcagaaataactatgtgtagtgctacagaatttaacaataggcagaacactacaggattttaaggccagttttaacagtgattctgtatttggccatttcctccctacaccagacctataaccacacaaacttgatggagcatgataaaactaagaaaactgctatgagccaataatcccataattaaaatgttctaacaaagcttagacgtgatagatgaagctattaccatcaattctgtatccagaatacacacattttaaaaacaccctaattacagaaacccacatccagtcaatacaatacatattagcaatttcccaatccttggtagaatagaaattattctgaaagtttaagaaggaaaaaattatgttcaggtattaatttcaatagaagaggcaatctgcttccatgcaaaaaccctggagtagtgctgtgagtgttacccacagaagaaaagccatttataattaggtacgacattacttttgtgaccacgtgtacctcaaggagaaggaaatagacatgccttgtttgcatcctgtatccttgcccagattaaataaagtggacagttgagggcagttatttggagatttggtttaagaaatgctattggtcgactacagtggctcatgcctgtaatcccagcactttgggaggctaaggcaggtggatcacgaggtcaggagttcgagaccagcctgaccaacatggtgaaaccctgtctctactaaaaatacaaaaattagccgggtgtggtagtgcacacctgtaatcccagctactcaggaggctgaggcaggagaatcacttgaacctgggaggcggaggtttcagtgaaccgagattgtgtcactgcactccagcctgggtgacagagcgagactccgtctcaaaacaacaacaacaacaacaacaaaaaaccatgctattaaaaagtaaaaggaagatttgggatatctgttaaagaccttacctaaacgtatctatgcttatctagcatacattctgtagatatttttgtagccttcttcactttgaccttaggcacagaccctttataaatgcttatgtcaaagaaatagatggatcatgaacaaatctgtccaattcctacaacattttaacaactgcatcagatcaccctcaaaactaagacacttaattgaaaggaaaacagttaggttgctcacaatacttctaacctcctttttaaaaagttgcgaagcctacatattttgactccatttttatgaaatgtccagaatagatacatcaggagagacagaaagtagattactggttgcctggaactagtgggaagagggaatggggagcaattgctaatgggtatgaggtctcattttcgggggatgcacatgttctggaattagatagtggtgatggttgtgaatatactgaaaaccactgaattgtacactttaaaggggtgaattttatggtatatgcattatattacaatttttaaaatcacaaaagactagaaattattagtaataccatattccctacgtgccaaattattttttagcctcaaatcatagaatcccaaagcttgggcatggttcctcaagagaccattaagtctaacatgcattttgtgaatagagaaactgacttccatagaggtgaagtgacttacccaaggtcacacacagcagtcgagaggagagctggcacctaggtgtcctgacaactatctagtgccccttgccaccaccactatgtggcccactctcatggtttatcaagcatgtcaacaataactaatttgaattatttaaaatgaggaataagtggttcagacaagaggcttttatttttttctaatgaaagcataaattattcttacagataagagaatctctgtgaaggagtagataaatttgttgtggtaaatttaccaggcccaaactgagatttacctgtaaatgtccctagaggaaagtggccacattaacagaccaagggagccctctacctgtgtatttgtagtatagatttcattgacaaaatccttgacctggaaagctaaaaagaaattaagaccaggtattctatctagtcctttgcccaccttggttggcttccagcattatttttaagaaaatgtgtctgaggatgtatttgtgggagcaatgggatacacggaggaaaatctacacaaagttccttttctgtgaataaaagggactgattagcagcctaaataaaagatccaaatatatttttttccagtgagaatttcattaaaataattatttccaaagaactttaaactcctttgaggatataaaatgttagtaagcatttttgttcatccagcatgaaagtttcattgtttctttgtttcagcgaaagatagggttgaatgtaaaaatcttgcaggatcctgaaaacatccaccacagagctgctgtaaatgcgaactatggaatcagtttgccatatattaatcagagaaaagcatgtgtaagtaatgagttgttttaaggagctcttatttttttaagaaataaaagtcatttattagtagtgtaagatgtaatgtagatgttaagtaaagattgtgatccttttgtctttggaattttttggagatgaaatggctctcattctgtttataattagcaatgattaagaaaatgtaagcctgtttttgaagacttatttgtagctcattcagatttctctattttatttgatattcctaaataatctagtaccataattttaacgaggaaataatttaccagcaaaaagaattaatagagaaattttaaatattgtatttctttgatagtaggcttaccactagaaaaatccaaataaaacaacagcacagaatcctcttccattgtgtatactgtcataatatgcaaatatttgagaatattattctaaatctgaggcaagcagggactaagcctttatgtcagcaaaatagtgagagggaaaaatagtcaaatgtagatctgcagtaagagatctcagagtcaatgccatttttgccattgactagatgctaccttgtcctaaagcaaggattgtactctatgttgtggagttttcttaggagaattaagagtagtgcttcattttagctgggaaattatttaatttgagatcatttctaacactgaaaacaattactgaggtaacatctctatttttttaaatacatttttaacctttggcttctttcaaaagctcttaaatgtatgccttggtgaaatcaaaactaaaaacaagattaatgttaggattaaattgcaaagccatttctaactagcataatagtctcttaggttaatcttccaaatttcctacacagacattttcaactgcctacttcattcgtgtaaccctgaaatatattttcagtttctttatatgtgctttatgttattctaacaggtttggtttaagagcactttatcttacaaatacttctatagcctaagaaataaccagaaagttagatatttttattcctgctgaaactttatttaaaatgtcactgtgaataatgtgaaagggtttttatctgcttcccatgagcccaaagcccctgaaatacaaatattatttctctggcaacacagacagaagcagatttctcttttgttgttggttttcctcttccatctagaattaatattggcttagctggaggagtactgaggctttgtagcccgaggcaactgctgtgtttcatgtgaactttttctgatgagtactggagttttaaaaggcatacctctagatttaaaaaggattatgctttgctttatgaatctgaatgaagattcagacttaagcaaatagagatttcaaaattatatccaaaacttggggcagattcttagtcattaattgtgtatttttccaatttccaaatagaatgagtgccttggatgttgtatctacatactttgagcaaagagaatttgggaaagcacttcccttttatgacatatagctaatagatattcatttactgtattaaatctcctttttccatcaaacttgatgccataaaaatctacaccagagcaatttaaaattggatatacattgtgtatatttttttcaaactgttggccttttgatcaaatagttagttgaccctatcattttatgttgatatagttgtatggtaatactaactgaaaaacagtattttcattttggatttataaaacagaagcattgtgcaaaaagtactgtgagagaagtgtgttcaggtatttggttttaaacagtcatataaagcatttggggataaatgcagttgtgatttaccacttataaaaatcgtttcaaaagcacttacccaaactagagtaatgtgtctagcattgggatgtatagttaattagaaaggcatcatcaaagctaatcattttagaactaaacactcaaacgggattattatttggctgccgagggccatgtgtttcgttacttcttatgaaacttgatcagcttgtcaaaagcttgtaaataaccttagacatttttgacagagcaaatgtgaatatgtagccaatttccattatttgttcctagaagctggtatcttctccatcttatgaagtggtgtattcctcctgataataagaggctgatgccaggattttagtgcattgaaaacacatataccccctgccacacacacatactcatattgcaaaactatcttcagaattttatatcctgtgactctgttatgtaaaatcaatttaccaaaaacatattaaaagtgagactcactggtgattttttcaatatcttcaatctgccaaatagtaacaaacaaccttctaacattttttctagtaggtcctcaaaggtatgtggaaacaagaagaaatccctggtactgttcatgttccctcactgacatccagttccagttagactttataatacaacacattaagaaatctacagaaaatttgactttgatttattccttttaaataaaaagtgtttcttaaaaggcttgaaacatgtatctgttaacatgaattttaaaagaacaattatgaatgcataacaaaatagccaaaccaaacattgctttgaattgctgcacaaataactgattataactgttatgacctagaaaaaaatcataaaaacatttttctttttggcaagatgtgagttgctgtagaattataccagttctttggttctactttccaaataaatatatatataatgcaatgtaaacttagaatcttttatttattcatgaggttgaatttaatactattatgatttctagattttatgagtcatatgttatgcagtgttttccactaacttagttgggtagcaaccacacttcacaaatcatagtttcattctttactgtttcacttggggtgtacatagtaatctctctctcactgaaagcatattcatttctgaaatgataaagtaatagaaagtgaggcaattgtgttaatgtcaaatgattagaagaagcactagaagtaaggggtggggtgggggtgggggtagggagtgggagtggagaaagaagggcgatttcaaaacatgattgtgttttaagcccatgcatatggccacaattacagtcacaacataatttggcaacggtagcagaattagatttaaacaaattgatgttacactgcagtaattcagaatgagcttgttgcatttataaaccataacaagaagcagagtgaattaataaacctttcttgtcactaaaaataaaaaaagggaataattgctgagatggagttaacttaacagatgactatagtcagcatcctttcaggctagatatgggaaagtgaaggtcacccccatctcagatgacaaagagggaacattttgttggtaaacaaattaatcttttgaaaggtcgccatttgttttaagtttttatccagttcttgtcatctggaatcagagattgactgtcatttcaccaggtaggggtgcagttgaggcagacaaagctgcttctgtacgtatcagcattccttgacaaaactcagtgcctgattgtgatgctatgggctgctggtttacagctgtctccggacaagaatggaggcccacccttgaattccaataagatgggcctgcatattccgcctgctgtaagctggccctctgcccacaagtaaaatgtattgtagttcaagccagcaattatctcttttacttccttctgtgctgcttctgttctctttttccaaaaacagatgtgggtattcactcaagttctgcatctattctttctcacacctgctggggcagaattttgacagaggtagagtttgagggagccagcagacaacaatcagatgcaatttctttgagagcagtttaaaaagaaaatgttgatttttcaggaaatgtggagtcagcatcttggtccccctcccttttcccaggagcatttggtaaattaaattagttgaacaaaaggaaatagctttaaagacattctgaaatgccatatcctatttatgacacaaagtcatcacccaaggactgtggtggcatgcacaacatcccactcctatcatttaaagtgagctttctcttcaggttgcttagaaagagtttttgacaaaggaatgacttttcatgtccttcctgattcacagcctataaaatatattccactaatatggcagtgaaggtggtggtggtggtggtggaggtggtagtgtattgcctttgtatgttgttgctattcagaatgtcaattctgcattggtttggaataatgggaaagctgaggaaagtgatggaatgttggctggtggatggctgtctcactaaagcccattgctctgggagcagggagaggcaatgagaggctatagccttgtcagataacattcataaaaaaaaatctagctgtagtgagttcttttaatttatttatagtggtatgtttcttgagcttctctgccatgatcctgtatgcattcccaaaccaaccctatgctgaactgaaaccactttttagctcttagaatagtgattctgggtcagactgcctggtgtgaatccttactagaccgggatctcccagaaacagtctccctttcctcatgtaaaatgtccacaataaaagtatctatctcataggattgtattgagtttttaatgagataattcaaagcacttaacaaaggtcctggtacaaagaagtgttctgaaaaatattagttattactattggcaagtctcatatattgtattgtgccattgttttatactgtcatttaaaacatattattgtaggggtccagggagggaaccagaatattgctgaggtctcctccagggatgctatttaatattttacatgattatgctttctttcccacacagatatgaggacagggaccttgttgtctgttctgtttgtctgtttttcaaatcctcccctgcaccaagcagtgttttacacatattaggtattaaggacaggactgatttgtcccctcctctgtctagtctctgctctgaagctatatagactgatgttgagttttgaagtgaagtaatgattttgctggctcctagtaggcctagttgcacaggataccctctccatgggccatctgataggatttacctagtgaaatgctggtactactggattcctgttgcagccttgccactaactaactagtgtttccaagagcaggttactctgtctcactcattctcatttttctgttttatgaatgggggaagcaagatggagaggcaatctggtgtgctgggaggggcttggagctgagtagatcaaagtttgggtcctatctgctattttgcagttactgaaccctaggtaagcaaattacatttcagatccggtgttccctcttttgtcaagtcaagataatgatgcctactagataagggtgctatggagaatacagataatatattaacattgctggcacataatgggtacctaataaggttcttaccttcctgaaaaatgaattagtgttaaaaatctctcatttccttcttcacacttatgcttttagaaaagaatctgatttggctccttttacatcctagtgtaagtgagtaataggatttaatgttcattttcaaattgttagagaactccagtgagtttcagaggggttctaagcatttaatttgcatttgatttttaatgataaatatttaagcattttaagtataataaagaagaatacctacatatttcaattgatgccaaattttaatgcatttgatcatttgatcgtcagtgggttaatttgtgctttcaggcttactctgagtgtgtgtgtgtacatttgaatttcccataaaggtgttttttattagatagggtgtagctttgtactagtcatattttgaaattcagatctgctcatatacactcctgtaataatcatacaaataaataagcaaagattaaataagctaatatgtgtgaaggtcataaagcagtgcctgactcctcgtaatcattcaagaaacattaattggtattagtattagaacacatgtgtgctactatcaattaaaagccaggaaagttctctggtgcatacttttggcacagcataatagtcaagtatacaattacaataatatagccatatcatgatagtgtagcatcacagattgtttcactgcttgatttaagtttgggttggttcttacatgatttgaaatgagctatacaatctttgacagtgcaaggttgcaatgttattctgtttacaactgcagataaaagtcaacaatgaagcataatgtcaaaatttggactcaacatgcaaaacaaaattagatttttttgaaactcagtgactgtctgaaagagaagggtggcgagatatctgaaaagaaatttaaatgggatgtgatagaacatcctaaaatgttacatgacacatttgaaaaatatttttggtaatttagctcttcaattgtagtagcatttattaagtttgccagacacagtgttttatgtacactatcttatttaacccttacacctctaagtaggtgccatttttataatcattttatagataaggaaactgagactaagattaagctacttgcctgaggttgtgtggtaagcaaggggagtcaggattcaaattaattatgaaatctatttgtcaaatatcccccaattgactacttaccaactaatccttaattattaaggaatgtaagcagttggtagatattgttagtcattctattttgaaacaaaaaatttctactattttaaagtttctggatcattttaattgaactaaattctgagattataactaccataacaaattgttagctatttgaaattacttatttgttaacatctggattttctacatcttgtgcaggcaaaataaaatatataaacaaattgtattctgtgatagatgtaagactgcagttatttataactcttgatttcataatttgtcttcatcaaaacagccttattgtttccagtgttggtttatattgctataaccagaaatatataatataaatacatatatagtaaatatataatataaatatttatataatatataatgtaagcacatactatatttaagtaacaattatatacatataggtacataatactatatgcaattgttacttatatatgttttgacatacacaattatactaaattcttataaaatttgcatttacttatttatcagcatctatttaaggttgcatttgaaaaacttgttctactgctgaaaataaatttgcaaatctttggcatcaagtattacctctcccatgggtatttattttttaacaagagcaaatccgctacttaattaaaacaaaggagttaggctctattaagggatttcaagcatgagtggacagagagaagagggatttgggggaatccaggaagagagcctttgcactgctctgaaatcattccaggtcagcagccacctgctaacaggactaggcctgctcccctatgatatacttttactttgtgccttttcactttatgacttgggccttgaacttgagtatttgtttgattacatactgagagatagtgtttctaacctcaaaattaattccactttgaaaagccaaatttaggtagacacagagacctgtgtcacatctatggtaggtttagggtacaggggtccatgggtagaactgtatttcaatagacagagggaactgtgtcacacctatgataggtttagggtacaggggtctatgggtagaactgtatttcagtataataggttcccatgtattttatttaatccatttataaaacattattctgagaaggggtctgtaggcttcaccagattgccaaaggggttcacgacgtcccaaaagttagagccgtgatagatcttttctttcacgcaaaaatccagtgtgggacaaagtatgcatcagaacagagaaatatcctaaaaaccctgtattctttatgggtgaaatatccacttctcttagttgatggtgccaaaaatctatggaaaagtggatacgtctagactaccagcccagatttttataagaattacatcttcttgagttaaaatataaaatttatgcttttgcctaattactgttgcttttctgttgcaaggaggaaaatagagcagctacgaaagtggtaatgcttgcaataatatagtaagtgttctgtttaaaacgaagcaaaggaaaaatacttcagcaagtagtgtgatagcattagccacaagagaaatgggactaataggattgtttttatcatggtccaggttaattatctactgagaggttcttgagatgaataaatactattgctgtgttctccagtattctaacccattgtaccttaaactgtacttgaattcaagtatacattcctagacttttaaaacctccttggtagaatagaagtaagtacccatagactagagtgattcgccctacattttctttaaaagcattgcctctgaattatactacagaatgtgtaaagtaaacccagaagatacttacttagaggagattcctctcattaggccataaagtttgggcaatatgacctgaaaataccagatttatataattgattatttatattaaaagattatataatcttcacaatagcctgaaaaataaatcagtttatggttggcaactaagaggtctgaaaacagccatgcatgctttagtagaaagagccgtagatggagaatcagaggacttgggttttcaatcctgctctcaattctggtgctgtaaaccaagttaacataggtataacacttagtctctaaagacaaattctttatctacatactgaaaagataaattggctacttcagaatcatcgtcagggccacagtcctggttatgtgactcccagattaatgctcatttggttccttgtggaaccactagtctctcaaggatcaatgtaattgatggatggaggcaagccttaagataggccttagaggaactgatgggcaagactaaaggagaggtgttgtgcattttaagtaccagaagcaatacaagcaaaggcagaggtagagaatagtgagagtaacggaggatggcttagagctttgcctaatcaagttgtagaaaccaaaagatgtggttggctgtggaggccagttgatggatggccttgaatgggccactgaaatccaactgtgtgattttcagtcaggatcatagaaggcagggcttaatgcagacagcttctgaaattagatcacttctccagctgctttaactgaagggcaactttagaattctttagaatgatctctatcccttgatgtcctcattagttattaaactttatttcctctccctttggctataaagcaatagtacttttttgaataacattatctcctgaacttgttagatgatcataaaactgcctaagtagagttctgcaggcagcaccttcccctgaccatttacatacaactctctgtccctttcatataaatggccactcagaactggccaatctaactggatggctgggatttcctctcagtcgctcttactttctgtcctaatgctgtatgccccactactacttacaattctgcctgtaacctcatccctgatccctacttctcacccctctctccaacattagataaaagcaggacttgttgggcaagagaagtggtggcaagagaaaaggatagagagtaggaatggttgattcctcacactttctgacccccatcccccacccaactctcctattgccacttcccagcctcagcactggacagtatgagcctcctctcccactctcaccctctccccaactcccttgtcttcccaatctaataatgcacagaaatgcccaagagactatcttaatccaaatgttttctgaaagatgggtgtgtttccaaacttatcatctctttgtgctaaatgaaaaaaaaaaaaaaaaggaaaagtggtgttcatggaacaggctttttacttcctgacatttttttcttttatataagcagtaaaaacccttagaaaatgtccaaattgttcttatttaaaataggagtcacaacatagttgtattgggtcaggcagataataagttactgaaatgactgagtgtaaaggctaggtccacattactggagtgctgaactgaggacacaggccttccctccaggaggtagccaccttagctctagccttttgtggctgggtttccaaaagaagctggaaagtcatgcttatattttttgtgaaatctaatttttaaatgtgtgatcagataattttcttaaaccctgtgtagttcgaagaaaatattctttaggctattcctgtcttgcaagtcaacaatttaaatcctctggttcagaaacaggaagaggtatggttttaggtatgataatattgatgtcttataggcagctggctgtcaacttagagcccattagtctgctaataccttagtgaagcccaagatctaacccttgactttataggattagagatttgattttgttagagtcagtcaatctcttgggtacagctgaactcataagagactgatgtacaaactgaaatgccactttatgtattctgaggagagctatcatggtcaaacagacctgaatgttcaaatcagcctgatctgatgagcatattttctccttattagaaagctacacagaatccagttagaaggctgcttagtgaacagggaaaccgactaaggtaattagttggacagtcttcttggtgagcagcagaatcacacttttatagtctgatgcacccatatgtgaagctacatttgccaaaaggatatgaatacatccctgtaaagtgagtgttttatggatactgagaaattctgactctccaattcaactttttataataaatattaatagctactatctgcttggggttgactatgtgcattatgttatatcacattaatccccgtggaatgagtgatattatctccatcttactggtaacgaaacttcagtatagagaaattaagttactttctccagtcattcaattagtaagtgatagaactcagaatcaggctctatctgatattagagcctgtgttcttaatcattgccttcctttttactactttcctgctatgaaataccactcgccttcagctgatgtcttatgtctttgataacaccaattagactacattccctttttgaatcttttaagtcagcttctgcatggatctgtccacattgatcatgtatctgtttttctagtttaacactcccatttggggtaaggggtggcacatctccttgtcactagtttatacgtcctatctgagtaattatactatccagaggatgagagaaaccctgcctggaacaaacagaatgtatcaggaggagaaagagaaaaataaggagattccttatctcctcatcttcccaaagccaccaggagttacttttagagaaaaataattctcctttctccttgtgtagctggtgagaggcccagatacgtctaatggttgggctcagatgtactaatacgttatatgagcttgcctggggacctaaccactttaagattgttcctaagaaaactcaattttctgagttccaaaatgcccttttccatttctcacttaagatggggctgacccttatagaagattatcaggaggagttgtatagtgaaaacagtgacccaagagagcagtagcattgtcttctccactcatttaaaagtttactccatatctaatactgggttagtttaacataaccataattttgggcaggaagttttactttttaagataaggattttcaaactgtaaccattttacttgtggaattatgtcatctaatttatggaattagcatttaatctaaacatttacatcccagggaaagtacctatcaccaactttctaccatcttgggtttagtattccatttatccatagtttaaagtgtagatactggactttaatagaagggaatataaattaaaatttagctataaagcaatagctaacatttctgagggcttctctgagttgggcatggtgttaagtacactttacatggatcatctcatgtaatcttcacagtaaccctaagaggtaagtactattcctactttcattttacatttggggaaactgaggcaaaaaagcagttaaataaaattcacccaaagtcatacaagctaaaagtcaaaggatcataattcaaactcaaccagtcggactttcaacgtagcattctttatccttttctatactaccttccaggtagctttgagggtggtgattttgacctgcatttgagggacagatctgggcccagtcaaagattgctttcttaatgaccaaggaattcaatgaggaaatttctctgccccaatctgaggcagaagtaaaagatcagagtatttaataaaaggctgtgttaactcaaggactagaacaagaagatgagctagtacttttaagatgaaaacttccccaactacgttcatatctctaacttcagatgtaatgtccaaccttgtcagaatgccatataaatttgcatttatttgtgtgtgactttgaataataccttgttaaagacctgtataattgagtgagaactatgttaagtttttctttttcttttttatttttatttttttgagatggagtctcactctgtagcccaggctggcgtgatctcagcttgctgcaacctccacctcctaggttcaagtgattctcctgcctcagcctcccgggtagctgggattacaggtgcacaccaccatgcccagctaatttctgtattttttaagtagagatagggtttcaccatgttggccaggctggtctcgaactcctgacctcaaatgatctgcctgcctcagcctcccaaagtgctggtattacaagtgtgaccatcacacctggccagccctctttttgtccatgataatgtctatccagctcttttaaggtagaattaattttctcttgcctaggccatcatagcatgcttttaaagcattcatatggtataccttgaattgaaaagggacttcgtatcttttcctcttgttagatctcctggaaggcaagagccatatttttttcacttaaatatcttctagggtaccttacaaaatgcattatgcatagaaggtactcaataaatgattaatttaattcaataaaatgtaattgaatgaagaggaaggattctgtagagaagtgacagggcagggagggtctgtctagtttcatgggcatggttttgagccatatttctctcatctctccatctccttcttcccacccccaagccctacacacggcttcccttaggtgattgtagcacaatcctaggacttatgttttggaagtgaacccaaggcccaggtagtcaacatagcagctggctttaggaagcaaacatgaagctttgttcacccccatgcccaattttctgattgtaacacttttttcacattctcattgaagaaaacttggaaaatacaagggttgaaagataaaaaattatgtaacctcagtccctccacctagagataattattatgaacttttaaatggatttgttttccatgtttggatgtatgatctttctcccttcgtccttcttgccttcctttccttccttctcccttccctcctttttgtttctctctttctctttctttctcttctccctctccacagtcccctctctaatgaggaacacatgtacctagtaataatcttcacataaaaaatgggggacctatgtgaagaaaactccaaaactttaatgaacaacatcagagaacacttgaataaatggaaagacatatcatattcctgagaaggaaaatgtttataagtatgccagttcttcccacattaatctttatgtccaatgtaattccaatcaaaattcctatgggttttatttggtttgcatggaatattaattttttcaacttgctagtattcatcatcttgaagaataggcaaaaggcctctttttttccccctaaagaagattaatgaaggtgaacttttcataccacttattaaaacatataataaaattacaataattatttccatgggtagaaaaattgatagatcaatggaataaaaaactcagcgtagatattgcccttagtgtaagaaataacttggaatgtaataaaggtgacactgtaagtcaatgggaaagggaggacttgttagatgaatggtgccaagtcacttggctaatgatttaggggaagaaaattagattaaatcctatccttgcactctatacaaagaaaactccggatgggttaggctgaagtaagatgtttgaaaaagaagaaataaagaaattagggccgggtgtggaggctcacgcctgtaatcccagcactttgggaggccgaggcaggcagtatcacgaggtcaggagctcgagaccatcctggcgaacatggtgaaaccccatctctactaaaaatacaaaaaattaaccaggcgtggtggcgggtgcctgtagtcccagttactagggaggctgaggcaggagaatggcatgaatccgggaggcggagcttgcagtgagccgagatggggccactgcactccagcctggtgacagagtgagactctgttgaaagaaagaaagagaaagagagaaagaaatccttaacatcataacctcatataatattgacaatcctcattacaagaaaagtccatgtttatattacgctccaatcctagatctggcactaattcctaggtgatattcttggggcaaatcacttatatttcatgggctttagtgtgtttatttgccaatttgagatactggatcaaatcatctctaagatctcttctagttctcaccatccataattctgatcgaagtctgtttcctttggtttccttccttcctcatttatgaacaccaacacgtgacatgtgagactgaaaagtagaccaggtgaaactgttttctgtactgattgtggaaataaagttcacagaaggtattgttttttcaatttatgcattcaacagagcatttgttgagtgctttctatatatgcaacaaaatatgcaacctgtcctcatcacttttacttgttactacttttaatactcagagcatattagagacattgtcactcccaatttccgagtcatataatttacatatggctctttcagaatttgaagatatattttattttgacaatctgattcagaatctagaaaaattatttgaagagaaattgtgaaaaaggataaactcttacacacatacatacacatacaatatttaaatgatcgaatgaatattccttaaaaattggcttcattactaaatgagttaaatttttttaatggaccgtatttgaggttaatctcttcattgacttcggcaaaaatacctgaactgtaagcgctcctagcctcctttcaggtttgcttaggcatctcttccacagactttactgatacagcatagaaattatggcaaagcccagtggagtcattgaagtaaaagtctcaatactgctcaggaagggatgccaaattaaataaaaagagccccagcagttctgcagctgcctgccaacccaactgctgggatgaggtaaatgaggaccaaactttatttcacttatgaccccagccagtatttaaacaaaaatgcctagagactggcacactgctctgtaataaggaataaaaagcaatagcaaaaataattataataaatgataaactcattcccaaagtctttcttagatcttaactgaaacgactaccatttaaactcatttcttctcatgtggtatcaagtatacacattttttcttatgaaatgtaatagtcatgtaagtgaaatggacagtactttattctctagtaattacttttccagattaaaatttctgttggaatgccacaaataaatattattaaatatagtgagaaaaaatagcaacaaagaatcattacatttttgtcaacctgaattcctcagaaaattctgggtccagtgtgtctcaagctccttcgaagaaaagttttatgtaaaatcaagttatcatttgtcttttattaatagctttacagaatgggctcctattaacaaattatagctatatcattgttagctatgtgttaatccttggatcatttttttccctaaaatgtagcccaaagaatgctggttctttggaatgttaataggtattccatgcaaaaagagtattgtggtcccataaaattgggaaacatgaggttaaagatagtcagactgatttttataccattaagccacctggagtcactaacacgctgatgtgccttatgaatctttaagaagggggaatgcagttagcaatgtttcccaaacttcctcagaacccctttctgcagaatagctcacagaactatattcggaggaacacactttaggaaattttgcttaagtgctggatttcataacaattttaatggaaaattttctagactatattacatactttccttcattagtcacattttaccataagttactgttttttgggggggattgggacatcataatagctctactttatgtgatgcgctgtatggggtctgtgagacatgcagatgcccacgcttcagatagctgctatgtgttcaaaatagtatttctgctgcagtttcctccagtcatttctattcaccacattctttaagtctgtgttcacaatcccccttgtcactgctgctgctagaactacccttttatcatcctaaaaccccttccagctctgcaaattatgatcccatgtatgccttttcttccttccttccttcttttcttttctttctttccttcctttccttccttccttcctttctttctttctttttctttcttttttctttctttctttttctttctttctttctttccttccttccttcctttctttcctttctttctctccctttcttcctctccctttcttcccctctctctctttcctttccctctcttctctttctttttcttctgtgttctctctttttccttaggccctgcctgtcctgagctttggcagcagggtgccttggcttttatcagaagccaaatggctacactgttttctccaggttattgaatcaaccaatcccagctttgcttccactcacacttggaaacttttcatttagttccctttccatattcatatctgtcctgtacaatatactctgtacagtttcaatcttttgaaattgattgaaacttattttatggcctaggacatcatttatgttggtgaatgttacatgtgcatttgaaaagaatgtatatcctacaattgttggtttgtggtgttctataaatgttaggcccaggtagcggatgatgattttcagcacatactgattttttaaaaattaattgttctaccaattactgagaagaggcttttaaaatcatcaactctaattgaagatttgtctattttttcctttagttctgacaatttttgttttacatattttgtgttaatattattagagacattcacatttattattgttgtgttttcctggttataagaaactttcatctgtttaagactctttcatcagtttcatctgtttaagaaaaatctcttttcctctctcatagttctttttgtcttaaagtctactttgatattaatataattacttcatctctattttgcttactgtttgcatggtatatcagtcttttctgttgttactttcaacctgtgtctttaaaattaaaatgcatttcttagagtagcatttagtcatgtcctgttttttaagttcagtctgataatctccgctttttgagtgtttagttcatttccatttaatgaaatttagatatggtttgatttagaacaactgacacaggactttccttgtctactttgccaactggggacctccacaactggcgacatacaccctgggccttgctcagccctgggccctgacgctggaggtgccctgcccactcagcccgcctaggttacatacagcttttgcctgtgttcagttgttcctgagctcttgtcctgcgtccaagaagaatgagatcatgctaacaatttgaaggttgaggagggcagagaagaattttattgagcaacagaacagctctcagtggacaggggatgtggggggtggttccccacccccacagttgggtggtttatcttccagtcttgctgggtctagggctttttatggactcagaatggggagtgtgtgctgattggtttgtgattatgcaaaagaggttaaagggaaaacaccactcaaaggtgggcatgacaatgtaaaaaaccaattaggaaagggtaggtgtatgtaaaataggtgaacagtgggttcaatcagaggaaagcacaccaaatgggaagaaaggttctcaatctggtccaaggatttacctgagacttgtagctaggctttaaattgtctcagccttcgtcagttttcactggggacctgcccctatctgcctaattatttatctgcctcctgccactatcacaactatctttctatttgttttctatttatcccatccattttttgttccttattctttgttttctgacttagggttacattttttttttttttttttttgagacggagtcttgctctgtcgtccaggctggagtgcagtggtgcgatctcggctcactgcaagctctgcctcccaggttcacgccattctcctgccccagcctcccgagtagctgggactacaggaacccaccaccatgcctggctaattttttgtatttttagtgaagacggggtttcaccgtgttagccaggatggtctcaatctcctgacctcgtgatctgcctgcctcagcctcccaaagtgctgggattacaggtgtgagccaccgtgcccagccagggttacatattttaaaataatttttaacattccattttaaatcttttatggcttttaaactatacctcttcatattatttttagtggttgctctaggaattacaatattcatccttaagttaccagagtttctttggagttaatattgcaccagttcacataaaatgtaaggaatttgcaactattgacctcccaattttttgtgctatcgttatcatctactttacatatattataaaatgcacactgtataataatttttgttttaaatagccaattgtctttgagagaaattaagagaagaaaaagatattatcttttatatttgccatatatatctgagttgtcatctgaagtcattttctgtcagctcgaagaatgttttttaagcatttcttttttttttttttttttttgagatggagtcttgctctgttaccccggctggaatgcaatggcgtgatctcggctcactgcaacctccacctcccgggctcaagtggttctcctgtctcagcctcccaagcagctgggattacaggtacccaccaccaggcctggctaatttttgtatttttagtagagatggggtttcaccatgttggccaggctgctggtctcgaactcctcaccttgtgatccatccacctcagcctcccaaagtgctgggattacaggcgtgagctaccacgcccagcctcaagcatttcttaaaagaaagctcatgcctgctggtaacacttgcctgtcttttgtccaaaaaaaaaaaaaaagtctttagattggccaagcacagtggctcacacttataatcccagcactttgggaggccaaggcgggcgatcattgaggtccagagttcgagaccaacctggccaacatgacaaaaccccgcctctactgaaaatataaaaattagccaggcgtggtggcacatgcctgttatctcagctactcaggaggctgagacaggagaattgcttgaacccaggaggcggaggttgcagtgagcaaagatagctccattgcactccagcctgggcaacagcagtgagactctgtctaaaaaaaaaaaaaaaaaaaagaagtcaaaaaaatatttagatcacctttattttgaaagatttttcactgggtatagaatttggggtagccatgttttttgttttttgttttttccttattcagtgctttaaagttccattgtttctgatgagaagtcaaccattattcacataattgatcctctgtgggtataatggatctttttttcttttctggctgctttcaagattttcttgcctttgacttccaggggtttgattatcatatgcttgaatgtagttttctttgtgtttattctgcttggggttcatcgtatgagtttctaggatctgtaagcttctgtttttttaacaaattgagcaagattttggccattgtttctttaaatatttttctctatgattctctccctcctctccttctggggcttcaattacatgcagattataccacatgactttgtcctacaggtcactgaagaaccattatgtaaaattttttttcttgttattcggattaggtaatagctattgattgctcttcaagttccctaccctttcttctgcctactcaaatttgctgtcaaacctatttgattaattttttatttgaaatattttactttcagttttagaatttccatttagtcctcttttatatacatttaatttctctgccaagattttccacgtgttcatttagtattattattttttaaggtccttaaaatatgtataacacatatatctaaacatcatcttgtatgctttaaatatatgcaattttcatttgtcaattatgccttaataaagttggggaaaaagctacctttgtcaattgtttatgtatagcattaataatacagaggttaaaagaatagtacaatggataacaatataactattatctaaaatgaaaatacactcacttttgaagtatgtacatataattatttataatcatatatgtattgtttgctaagtgtctgcaagtacattatacttacgatactttatcctaaatagtgcatcatgagtctcttcaaaacaagaaatattctgcataaccaaaatgccattataacacctaagaaaataaacaataacttactaatataatcaaatagcaacttaatatttaatatgtttatattttatttttgatttaaaattataattttcatttgatgctttattacagaatgtcctttgataatctgggttttataaattctaagtatgtgccatagacttttatcatttttggcataaaatctcttcaaaatttctttcctcaaaatatttaatattaattagagatttagaatattttagaaataggaggttgtttacattaatcttttttttattattacactttaagttctagggtacatgtgcacaacgtgcaggtttgttgcatgtgtgtgcgtgtgccatgttggtgtgctgcacccattaactcgtcatttacattgggtgtatctcctaatgctgtccctccccactacccccaccccacaacaggccctggtgtgtgatgttccccttcctgtgtccaagtgttctcattgttcaattcccacctgtgagtgagaacatgtggtgtttggtttttttgtccttgcgatagtttgctcagaatcatgatttccagcttcatccatgtccctacaaaggacatgagctcatcctttttatggatgcatagtattccatggtatatatgtgcctcattttcttaatccagtctatcattgatggacatttgggttggttccaagtctttgctattgtgaatagtgctgcaataaacatatgtgtgcatgtgtctttatagcagcatgatttataatcctttgggtatacacccagtaatgggatggctgggtcaaatggtatttctagttctggatccttcaggagtcgccacactgtcttccacaatggttgaactagtttgctgtcccaccagcggtgtaagggtgttcctatttctccacatcctctccagcccctgttgtttcctgactttttaatgatcgtcattctaactggtgtgaagttttcaattaaaaaaatcccctgaaatccacagggaaacattttttattaattctacaagcagcttatagaaaacaacaattttcagatgaatatataaacatatttcaatatcaaatcagcctattattttaattaacctaaattgttaatatgcactgagtttcactacaatattttaatgctttctatatttcagtaaattgatttcagattttagtttaccttgcaagcattgtttttgaacatcgttgtcaaaatgtgaagatttactaaaggtttctgttaattttaaggactgatcaatatgaatatatttacttaaagcattgaaaattttacttaaaatataaacagaaattcttaatctagaatatcctatgtatttttcagatttctatttacatttgttaaatggaggctcgctgtaggaaagagaagtataattcaatttataatttaggtatattgtattagcagagagtatattagaagtggttatattagaagtgagtacaagtcataaggaaattcagagacaaaatcaagtaaatatgatttcttttttcaattacaagctttctgagtttgtgaatcaccatagcttaagtgttacccattatgcaaaattattggtatttcttttggtcatctatttaaaaacctaaaatatttagaagcatggacatgcaatgtctgaatattttgatactccatgatttgatgatacattgctgcataataaatcacatcaaatcttaaaaaaaaatgtataacagcagctctagagtccttatctgctcattctgatatcagagtcatcttaggatctgtttttattgcctactttttctttttactgtggactacatcttcctatttctttgtatgtacaagaacttttattgttatgaacattataaatgatacgttctagagacttggaattgttatcttgcttcctaaagtgctgattcttattcaagtaggcagttaatttggctagattcaaactccagactctatgcttgctgtggttggtagcagctgaaatctctgctcagcttttaaaaatctttaacagttccatcctggctgggctcctttaaaacctctttcagatacatggagctcagaggtcagccaaggatttatatgtcatttatttgcaaattttggaatctcctgtccttcttgcaatttcctcatttctattatttccccctattttcagcttttatgacagcactaaactccatcctctgactttcaagccagtaagactgtgtttttcttcttgaattatagccactctgcctctcatagtctgagaagtacttccaggccagaaattacacacacataaatctcaactgttgaagttcccttctttcaagatcagctaccctctagcttctgcctgctttcattctcagtgccttcaaatagttggagttttgtgggggttttttgtttgtttgtttttagtttttttttacattttgtccagagtttgttattattgtcttcaggagagagagtcttttataagctgctccaccattaccataaaagtaatacttgctattatattacctttatcaaaatagaaaatatttgctactaatatgttcattttaagtgctccttcccggaaagtcttaagtgattattttttaaaacattctttgctctttttcttcttcagttgagataataagacagaattaaatgagttttgaattgcataatgccttcagaatagtatacaaataattacaatatatgttataaatgtaacaagataagtaaaaagaaaaactatagaaaatcagaggaagaagagatcagaagtgatttcctacaggagattacgttttagctagttgttaaagggtgacaagaatttaatagcagagcctagaggaggagaatattctagaaggaacattgtaagaaatgcaaaaaagtgctaggtgaggctcaagtcttactgataatatgtataatttatgacttaaaatcaatacttaaaagttcatggcatgaacatactgctgtacacaataacatggtgaatctcacaaccagttttgaaagaaaaaagccagatacaaaagaatacatactgtaataatctatataaagtttgaaaacaaaaacaataggtggcaatagaattcagaatgctggctgcctttgagttgtggtagtgactgggagggagcacacaaggggcttctggtgtctgtaatgctctactccttcctctggatactagttacccacagtggtcacatgataacaattgatcacttgtgccttttaaaaaatgaatattgtggctgggcatggtggctcacacttgtaatcccagcactttggaaggctgagatgggaggatcacttgagcctaggagtttaagactagcctggacaccatggtgaaacctaatctctacacaaaatacaaaaattacccaggcctggtggtgtgcacctgtagttccagctgctcaagaggctgaggtaggaggattgcttgagcccaggaggtcgaggctgtagtgagctgtgattacaccactgcaccccagcctgggcaacagagcaagaccttgtctcaaaaaaaaaaaaaaatgttgtacttcaataaaatgtttacatggaaaaaaacccattcctggtgtgaaaaataatttatggagtgcatctccatatattaattcattaattcctcacaatagccttatggaagaacagtgatggtgaattttatgtaaaataggattttataaattcaaagtatcatgatatagaaaccaggtctgtctgtcactcaggctggaatgtagtggcataatcatagctcactgtagccttaaactcctgggctcaagcaatcctctcacctcactcagcctcccaagtagctgagattacaggtgcatgcccagataattttttttattttttgtggagcctggatctcactatgtggcttagtctggtctcgaactcctggccttaagcaatcctcccacatcaccctcccaaagcactgggattgcaggcatgagccgctgcacctagccaaattctggctttatacataaagtttgaaataattcaaatttgagtgaattatacacacacacacacacacacacacacatatacacatatatagtgaattatatatgtgtgtgtgtgtgtcctgtattatttaggatatgagctctgaaaatgtagaaaataacaatagattaaatacaaccataattaacagtttgagcatagaagtttgtggctcgtctggcagttccacaatgtcaggtccatacacactttccatctgactgctctgacctcctggacaggcatcttgtgatctccggtggctactcggctcccaccatcatgtctttatttcagtcagtagagtcagtaggttcctataccactggccagaaccttgtctgaaagccacagaaagctgcaaggcagtctgggagatgtaatttctggatgtcagccagcagtctttgccatacctgccattctttgcctgtcttgaattatgtgagttcagaattatgaaatgcttccagaagcagatcctttacataaaaattacttgccctgtggataagaggattcctattttacagaagataaaactgagactcagagaagttaaataacatacactctgcacattgctaattaagtgacagagctaggaatccagtccagtgctccaagcccaagattcttgcctttattatagatgcctccccagggaattttcttctgtctccaagaatgctggtaaacctgaccaagaggaagtgagactcctactgtatttaagtggcaccaagaaagacctgagaaagctggcagagtggtaggacatagggtagagccggtgacctaagctgtgcttggtgaaagcatcagaaactaagaaagtgcagtaaaaaaacaacaaaaaacaaacaaaaaagccccactgggccatgaagcagtgacatgcatttttcattctgcctctgaaattgataaactgtatgctttggctatttttcctttctgcttcttagttttcctcttccataacatggagttgaaggtagggagggatggccttatcttcaactaagtaagcaagccctgatggaggatatttctcaagatctcaagacaggcaggagagcctaaaaactttaacaaggactgcatacctcaacagaggcttacccccatccaagccctcaggtaacagaaaggtagaaaaaaacccagaatgcccagttctcacatgttgctgggagagatcacacactggtaccagataatgggagaggagattctacatcacagcaagtagaatgtctggacagagctacccaagtatgcacaagagaaaaagaaatgatatggtcactatatggatttcctgtggtctttgtattttctccaagtcagtatttcacccacagctaacgaaagcaagggaggggaaatggaagggagaattaggggctgcaaaagacaaagcctaacctagaaaaaacataaatgaaggagcagaaggaattttctcacaattacttcacattatactacaacttaaagagaacataaattaatttaaactagagctcaaacatgagatgataaaatagaagaataaaaaagggatataagggatatatatccttgcagatataaggaaacaaattgaataccagaatactttatggaactcataaataaactataaatacaatgaacataacaaacactgctgaatattaaaatactgacatagagaaaagactttaagtacagtaaatgcagaagaaaaagacaaaggaggttaattagaagctaatagatatacctattagtttggtacaaactataagaaagaaatccaaaaatataatgacttaaataaattagtgtatttctcattctcaaaacagtccacaagtgagaagtccaaggctggcaggacagctctgctctacacagtcattcaagatacgatttctttcatcttgatctccatcagctcctcattacagtagttacaggacattctaatcccagtggtggaagctggctcctctccacacccacatttcagcccttaggaaggatgatgatagtactgccaagcactctgaggacatgacccagaggttacacagatcacttctgcttacaacttattggctggaatttggtcactggtccacatttagccacaggggatgctgggaaatgtattctgtaagtggacagacatgtactcagctaaaactcaggatgtcctattctaaaaggaaccaagtaccacaatatgaaagataaggatgagccaacatttaaggatatttggtgtccctaaaccagagaacccagaaaatgaaagagaaagggtattcgataatataatgtaagaaaattttctcaaagtcaaggaagaactgagtctacaggtaaaaagaaaacatcaaatcccaggaaaatttgattttgaatatttaacatacaaatatattttagttaaatatttggatttcaaagacaaagaatgcttcagacatccagatgagaagaaagtaaatcaccaaccaggggtggaaaagcagatggctgtcagacttcacaataattatcattgtggaagaaaatggtgcaatgtctacaaaatttggagaaaagaaaggatgaccccagatgtaattcaagtatgacttgctttaattctagtaaagtacacatgaacacttgttgggaaaaactacttgataaccaaagctagccaattaagagatcaataaaagagctcaagcagagaagccatgacaaatgaactatatgtgagcactggacccatttatatgtagagctaatactaaacaattatagaatcatggtaccaaaacagaatgtgaacattataaatctggatggtgcaaaaattaagatacaatcaagattggggaggtgagggagtggagatcagggcatcaagagagttctaattttctcaccatttgaagctaagatatagtattcaaaataaaatcgtggtaaatagatctaaacatttttcagagtcaactttaactctagagcaggggtacacaaactactgcttgagggcaggccacctgtttttgtaaataaagtttttgtccatttgggctgctataacaaaaatacgataaactgggtggtttataaataacagaaatttatttctcacagttttggaagctgagaagtccaaaatcaagctgctggcagatttggtgtctggtgaggacctgtttcctggttcatagatggcgccttttctctgtgtcctcacatggtggaggggacatagcagctctctggggtctctttttataatcccattcatgacgattccatcctcatgatcaaaccaccttccaaaggccccatctcttaaaagtatcacattggtgattaagtttcaacatgtgaatttaggagggacactaactttcagaccacagcttcactcatttatttacaaattgtctgcctgctgcttttaactacaaaacaacaaatctgaacagagccttcatgcctaaaatgtttgttatttggccctttaaggaaaaatttgccagcccttgcagaggaatcatttttaattcagagaaatcttgtggtaaagaaatatttatttgaagtttaataatgtgttaggtttaattcagccttttttcctcatgtaaaattaataacataagtcctattttttatacaaggatatatcattctaaagatgtcagggacgatggatcacctgatgatatttggcatgatctcttaaacttttgtcttttgtatttctacactgcttgaaatctttataatgggcatacatcatttttaccaaaataataaaatagaatggtttttctatttgaaaacactggaagcaaatatgccaaaatattaacaatagttaattctggctgatgggaatatgattgctgttttcttctttaagcttttctatattttttacattttcaaaaatttttggcagggtgcagtggttcacacctgtaatcccaacactttgggaggccaaggcagtaggatggcttgagctcaggagttcaagactagcctgggcaacatagcgaaaccctgtctctacaaaaaatacaaaaaattaaccaggtgtgttggtgcacacctgtggtcccagctacctgggaggctgaggtgggaggatcatctgagctcaggaggtgaaggctgcaatgagctgtgatcgtgccactgaactccagcctgggtgacagagtaaggccctgtctgaaaaaaaaattttaagctattatagaagatttagcatcaagtgataaagttctgaattccagttgaggaaataataatgagaaactagctagaagggacattgttctatttataatatgatttatattatatcatattatacaaactacaaagtgtggttgcagaataaaatataataaaaaacatgacaaaaagaagaagccacagcagatgatatttgaatcctttcaggcgatcagcacattcataaagctggtttctttaatttgcatcagtctcaatctacctttccagtctcattcccccatcctaccctccttctcatacccataccctatactccagtcacatagagctccttctcgtcagtgaaatcttcatgcatgaaatatgctgttttgcaccattgctaccacttttactacctataactgcatcctcttctccacctgatataatttagtgctttatttaagatgcaatttaaatgtcacttactgcagtacatcttaactttggctacgcatcagaatcacctggggagctttctagaaatactgaggcccaggccccagcctacctattctgagttaattgcccagggttgggtcccagggttggggcccaggcggcagtatttttaaaaagctccctgagcgattctaatatacagccagggctgagagtcgctgcaaagccttctgcaatacaagcaggcagagttaattactccctcttctatactcctacagcccttagcttttccattgctcatgaaatttaatgctcagcgtgttaaagttagtgttatatagtaagtgctcagtaaatgctgaaggttgtttcattccttcaccctccaaccaagcatacgcagaagtgattatccttaccatggaagaggacagcagagtggacagatgtttcctatccagtgacactatctgagggatttatttctgtcaacgaaaacaccaccttccattctccaacacatacacacacacacacgtgcacacacacacactacacacacagtcacctcactgccttttcagcatagttcttcggtctggtttttacattgtttagattgatgcaattgaaagaattaaagcagtgtgatgaatgtgctgattgcctgacagagtctgaacatcacttgcctactgtcctctcctttgtgtcatcctttatgttgtgttttatgttcgatcctgctactttagcttgtcagagcaggttgtcaggtgttctttgtcaaaggctttgagaaaatccggataaattatcctctttgtcctgaaactgccaaacctatattttacatcatcacagtgcttgacagttttatttaagttgaatctttctctcttcctccgatttacctttgtctcactgacctttatatcaatcagacaagtggagaccctgccgcttttgatattgaatattctcagctatgtacatgcctgctagagcacagtgcattggatatctcagccttactgattaggaggagatcctggaagctactcatgtctggagatgaggtggggagaggagagctgaggataagggcaagaaaccaatgtggatcaggaagaccagagtctcataataaataaatcttcttatgagtcctgcactctcattaaggcgaggctggtagcacctccctttccccttctgactcacctggggagaaacagattgcactaacagtctactctttcctattcaaaatactatttttatttatttaccaaacatcatcaaagtgtttgatgttcatggtgttaccacatcctggcagtgggggccctaaccctttgtccagacatttctcagctaatagatacttattttgtaaagtgattttctccctctggtcttgatgaagctttccctttctttttccttaaagtcactatgaccttaatggcaataaggtattgtgcaaccgagtccaatggcaaattttaccaatgtaaaatcagattaatttcagaattgaataatctgtgcatatctagtatactgcatggcctgaaacaaatttctaatctttctgtcttgagttctttattagttaaatagcaaactgttacctagttcccttggaagttatgtaaattaattaatgtttggaaaatgacttgaaaattcagtctataaataccaaactataaataccaaagttgcattttccctgctgagagaacccaggtaattcataaactcctacgataaaggtaaaaatagtatagttggactatacaatcaaatgtgatttatatgcaatatatgtaatctttaaaatctagaaaccatttaatagaaacaattcatattttgtaactgtaataaaagcattttatgactttaggaaaagtaattatcttctctaactgatctagatattgtgtctttgtaaccatctctgagatctgcaaaagaatctacccagaattaatattgattgacatgtttatcttttaagtcttccaggttttttgttttaacattaacactctaacatttatttcctgggaaattttttggtacaaaactttgctgtattcaaaacctcctctgtcaagatttagcatttgtatattgtagtcattaaaattgaacaaaatcttaatagttcttttattaactactatgttgactttatatagtggaaatcacaacttgttaattggatttaattaactattttaaattacacaaactcctgatggtagtagacaatagcacagggtattcatgagcaataaaattggagctgatattgctactttattaaaacttaatgcaactattcataactttatttattgtttacaagaagaaaactgttcactgtgaaggcaaaaatgtttgctgaaacaaattttttattatctagataaaggtttcgaagttaatcaaagggtctaacatatccagcctcacggttctgccatcttctcattgcacagatccctatttcactcctataccagtcttacaagcagatgcccacaaaggttagtgattcaatagccattttacgtgtttaggaacggaaaagaaagagcattgaggtaggatcggaggcctgaatttggactctggctcagccactaattctcctgggtggcctcagacaagtcaggtcctcactctggtctgagtttcctgctctgtaaattaaaaggttggacaagacgatcactagagtcccttccacctgtaaaattcatcattctatggatttaatattgatttagatggtgttattacctattaaaatgatcattgtgtttatgtgatagcattagaatttattaagtttctgagcagatcatttttgatatattattctggtagcattttaaaaatttatttcaataccctattataaggaaatatgaagccagaattaatgtaattagtgtttaaactatgcatgttttagtctaaactctagtcttgtgaaaccagtggattttgtttttaagcaaaggatttcatctttatctcagtatctctagcacctagaaccatatccagcattttgtagatactaagtgtagattgagtgaataagaaaatgaaagaataagcaagcgagtgaccaaatactgaatgtcctaagtgtaaccatctctactgttccctgctatttaatttaattgaccaaagtgttaaaaaatgcctaagtggatccctttcctatctcaaatataacttagtgagacggtctttaattattccttatctcgccttctatctgttgtctggaatttttaggacccaaagctggttcccaaaggttcttctgccacctggaaattcaaagtcctccagcttctagctactgcatcttctgtctgctggtggtagataacctgagatcattataaatctctggatttgttaagcttctcacaactttcctggttataaaccattgttcagcaatctttgtgacatatgctttctagttagcttatgtaatatttacttcctgggaatactgaataacaccagcagagtgttcccatttcttgctttaataccatcttatattcttcctgaaccaaattaggatgaatgaaatagtgaatgaatgaatgaatcgatatatctgtctgtctatctatctatctatctatctatctatctatctatctatctagtctgctctgctttagcaatagagacaataaaaaaatgccacaaaataaaagtaaatgtagaattttggcaacttcatccagaaaaaaaatcacattttcatttctaaattatcttcatgagaacacatggcctactgtcatattagggattaataaattaatcggcatatatttattgagtacttgcaatatgtctggtattgtgcaagatactatgaatgtcaggaagccacaagccacagaaatataaatacagtgtctatatttttttaggtgtttctgatgcccttaaatgttgttttagcctcaccccagatctacacaggtccagaatgaggtgaaagactaataacatgcagaagagagaatcattttgaaaaatgaacttcaaactttcctactttttcttgaatacctggctaaatccaaaaaagaaagctttgccccacccctccaaatggttaagaatacaagttttacattacatagaccaaatttcagtttggctctgtgacttgaggcaaattgctctctgatcttagaagaaactctgaactctatgaacaaggtgtgcttgatctggccctcacctacatctccatttctcatctcactcagctctctctatacttagccacctaggccttcgctctcatctctcatctttatcaggccaagcacatttgcagatcaggctttcacaagtgccttttcctctgccagtaaaggtcacttcctcaagcacctgtccttttccttcagagattatcacaatttatcataatatatttattttaaatctatttaatatcttctttaccacttgaggctccatgaggtctttttggttcaccactgcatccccagcccccagaatagttgttgacacataataggcactttattagttaaacgaatgacagaatgaatgaacttccaattcttaatctattcaacaggaaagtaagggtggatttaataaaacatggtgttttattaaacatggatgaggatttaataaaacaatggtgttaaaggataactttcaaaaacagctaaaatcatgactctcatacaaacataaaatgaacacaggtcaaagatttttatttaattcatcagttaacaaccagttcaaaagaaaatccaaagaatggacacatttgtagatcaagaatactgaagtaaatttgcaaataaatgcaaaattggatttcccatgaggagaattccccttcaccagacagaatttattttcatgtctatagataagaattatttgcattatgatcagttatttacaaagtaacctcaatatctacagagttgtaagtagcctaatcaaaggctaggctcagatattcactggagacttcaggactctattaaaaggatatccagtgatcccatttgcttattctaaaacttaaaaaaattcttacaatcttctccccttttgacgaaaacaatctcaaaaaccaaaaattcacagaataaggctggtctcagtaggtttggcctgataatttacataggtggggcaagaatgttcatttaccatataagccaccttacatttgctttgttggaagtttttgtagagaatctcagcctgaataaaatcccctattatttgctatcccaagactagaaaatcaagcccaagaaactctgttcatcagatttcaactgcaggacctataaatttgggtaaatttctctcttctagaagtcctccaaatatcctaaagttcttagggctatagcatgtgaccttccttaccacctataaggctgaaaatcatgtaagccatataccaggctagtttttctgggaggactttgtaagcattggctctataacgcatcaaccttgattctttaaaagtgactcgtcggccagcacattggttcacacctgtaatcccagcactttgggaggccaaggcgagcagatcacctgaggtgaggagttcaaaaccagcctggccaacatggcaaaacctcatctctactaaaaatacaaaaattagccaggtgtgatggcgggcacctgtaatcccagctactctggaggctgaggcatgagaattgcttgaacccgggaggcagaggtacagtgaatcaagatcgtgacactgcactccagcctgggcaacagagagatactccatctcaaaaaaaaaaaaaaaaaaaaaaaaaaaaacagtaacttgtcatacctgattaaataaacattattctcaaatataaaattctaggcaaggccttggttgaatagtgatttttctagttatgtcttagtacaaagagagcagcactgaaactacgtaaattactatattgccatgaaaagtagagactcaatcagagtttctgaatttgggaggtccagggagcacattcaaagtattacaagtttgatttctttattttctggtaattttatgaatattcaatttatataaacacttatttatctctacaagccaatcagaacagaattcctttatgatctaatttattaatgccatctggagacaggaaaacattctgcactcacaatgggagataaggaacttcctgaattacagatacaaagacatacagatagagtgtatatcctcaattctaccatttcagccgcagatagagaataaacacaagtggccaggcgcagcggctcatgcctctaatcccagcactttgggaggctgtgaaggtagacggattgctggagtccgggagtttgagaccagcctgggcaaaatggcaaaaccgcaaccccgacaaaaaaatacaaaaatgagccgggtatggtggtgaacctgtagtcccagctactcagaaggctgaggcgagaggatggcttgagccctagaggcggaggttgcagtgaactgagatcatgccactatactctagcctgggctacagagtgtctaaaaaaaataaaaataaagaaagaaagaaaaagagagagaaaataaacacagaaacacaaaaaagcttaccagtccagatatcaaagagttgttctccttccttgtgaacaagaaattcctaatttgagctcaaaatagacagatggacaaaaactaacaaactgtattctctataagacattagatcatttccagagatcaccaaattcccaatcatggcagctgccaacagggaataacttaccatccataaatgaactaaaaagaaaaacaaattaatagagagtaaaattaaaattagaaaaacaagaaactttaaattaacctgtgggggccaagaaaaatcatgcctgggcttggcttcctgtgagatacatcatttctgattacttcaggtgaccgttttgctcatctcagtgggatctccaaaatgttaaaggatgattttttttaaaagtaaagttatgactcttatataaatataaaatgaacacatgtcaaagattttattagcttattaattaagtgagggagctagtaagatgttacagtaaattcaaaggacaatccaaatagacacatttataaatcgagaatatttaaataaatttgcaaatggatgcaaaactggcttttcagggagtggtccttccatgtgtaagaatttaaatttgcatgtgtataaacaataattagtgacattcttatcagatttctacaaatgaaccttaatctttacagaattataaaatggacaattaaaaacaaagatgcagagtggctcacacctggcacagtggctcacacctataatctcagcaccttgggaggccaaggcaggaagattgcttgaaaccgggagttcaagactagcctggacaatatagcaagacctagtctctacattaaaaaaaaaaaagccagacatgatggtgctattccaatagtttaagctaccaaggataaggcaggaggatcactttagcccaggtattcaagggtgcagtgagctatgatggtgccactgcactccaacctgatcaacagaatgagaccctgtctctaaaaaagcaaaacaaaacaaagatgcatacagagtcctgtaggactgtaggtcagataatcttcagagattccagcatttcaatgaaaagatactcagtaatctcttctgcttgttcgaaaatcttaattttttccttccaatagtagatgggcacacatatgtgtttgtctgaaattaggataattgcttcaaccagcactaaagcaagggttgaaatcgtgcttatagtcttcagaattctcagaaaatgaaactgactcttgaaatgaaaaatatattaaattataaggagacctgtttttcacatctgcaaaacagagttcttggaaatgaaatttgatatttataggtggaaaatatttgtgaggacaaagaattagtcttacaagatttttaaagtagttcaatctagtgttataaaaattaaaacctgaagtactaatttcaaaaaggtcctaaagtgttatactctggatcagtaattcttaagtgttaagagtacaaaagattaacctggagtgcttatttaacatgtatgttactgggccccaattctagtggttctctaacttcagcgcacatgaatatctcctggagccttcaataatgcagattcccaggccctgtcctcagaagtttggacaggttgagttggggcccaggcatctccgcttttaataacaaattcttctcctaaatgattcttcagtaagtaaactgaagatttctctttgaaatcagtgttttacaagtgaactatttttcagctctccaacccttcagtgatcattctactgaattcctataacactagactaacattcttaatagtaatatagtatagaggtcataaggtaaatagaaatagcattggtccctcttagaagggaccaagttgtgtgccaaattcttcaacttaggccaacttgaatacacagtttgtattctaggattttgttgagacccagagctctttacttactttctattatgtaaaagagcaacaagaaactgaagccctaccacaaatttattgcaagtagtccccaagttttaggtttctggcttcaacacagtagatccaccttaacaaaagttttccctctaacagcaggcttgggtcaatcattcattgacttattcatttgtttatttatttaatgatgtctcttatccttcaaaagatttggcaccagccatgctaacacagtatgaatgctaggaattgtaaattagttacattaatactaaccattttgcccagttgtattaaaataacctatctgagcattaatgtttctggtgatatgagaaatgtctaaaaataactccttatttgataaagcatgactgattatacaacaggggcatggtttcaagtacacagatttccttcttttggaacaaaggatctccttagttattaagaatctgtgcctgatttctctgaattttaaaaagagtaataatattaccaatgattgaaaatatcataagtataaagaagttttagtttgccttgaaattatatttccaccttaaaatgaaattactttagtgcaattttatttcatattactgccattggaaatgacatttttccttgggttagaatattacatttaaatgaatgtgtactgtagctatttttttatgcaaaggattaaggcactagatgtaccctcacaaataagatgatgaatggagtaagttacacttgtgaaatttatagagctcagactttgtggaattgcttggaattaaactcacattttattaatgtttctttttagggattttaagtatgatagaacgagggctgattccaccaacagcaaggattacctttcagaatccacccattacacccagagcagctcctctgcatagttttgatgaagcacgtaagattccaactgtaggtaagatactcatgcatctcagttcagttggggacacacagaaattatctctgccccagatctagccttctagtagccaacttttgtcctcaataataggacaagatgaaagttgtaatcatcctgagtttcactacattcccacagtcagctatttcttctataattctatttacaatatatttccatttcactttgagcactatcagttttcattcttctggcgtacttttaacctccttaaccaactctgtctttcatttgtacattttttgtgaaaaaaaaatgatgtggatttatcactgggagtcaaagaggcaatactactacattctttagtctgtatgcaaactcaaaaacagatgcacagtgaccaatgactgacagactttgaatggaatgacttgaatggtcactgaccttgatatgcatctgtcacttatgtagtgatttgtggaatagagttctagcagcaaatttatattttatgcaattacaattttatggtaactggaatttgaactatgttggggtactgatgttatttaactaaactgtaatactagaatttgtacatactggaacagtccaaagtgaaggctatctttacattaagtgtgaatgttctaaatacaccaattaaaagacagagattgtcagattggataaataagcaagacccaactgtatgtggtctctaagaattgcaatttaaatgtcaagacagataggttaaaataggagtagggtgagaagtgacaaatctttctatagaagaattccaaataatgtatttatttttatttatttgttttgagatggagtttcactcttgttgcccaggctagagtgcaatggcgcaatcttggctcactgcaacctctgcctcctggattcaagcgattctcctgcctcagcctcccaagtacctgtgattacaggcacccatcaccacgcctgattaattttttgtatttttagtagagatgaggtttcaccgtgttggccaggctggtctcaaactcctgacctcaggtgatccacccgccttggcctaccaaagtgctgggattacagccatgagccagcgcgcccagccccaaataatttaaacagttacctcctcctccaggaaatgaagcttatttatccacccctcccttctctttgaatgtgagttggatttagtgattcacatccaaaatagagtacggaaagaagaaaaacagaaaattcgcaatggagaaacctgcaaaccctgccttaaccaaatgaccaaggataatatcattagtcataattcatgttgatatcatgtgccccctaatatgacacgatgaggaaggacttcacctttatgttattctgccccaacaacctataactacagaaaaactatgagaaaaacatcagacaaacccaaatttcaggcattctacaaaatacctgaccatactcctcaatactgtcacggtcatgaaaacagggaaagactgacaaactgtcacagaccagaggagcctaaggagacatgatgactaaatacaatgagatatcctggaaaagatcctggaacagtaagaagacaagagtgtaaaaactagtaaaatctgaatgaagtcttgagtttagttaataataatgtatcaatgatggtttcttgcttttgacaaatggaccgtggtaatggaatatgttaacattaagggaaactgaatgaaggtatacaggaccgttctagatcatctttgcaacttttctgtatctaaaattattccaaaataagaagtttatatatttttaattcaaaaataaattataggactagacacaaattaaatgtaaattaaaaattaataaaaaggagaaagatggaaaaagataccatacaaacaataatgaaaagaaagctggaatggctctattactatcagatgaagacacattaacaggaataaagaggcacattaatgataaaaggatcaatccagcaagaagacatacattcctaaatgtgtatttacttaaaaacagaaatataaaatacatgaagcaaaaattaataaaacagaaataataaatccagaattatatctcacaataatcaatagaactagtaacccccccccaaaaaaatactatagaacagtggtccccaacctttttgacaccagggaccagttttctgggaaataatttttccacagacaagaggtggggaggaatagtttcaggatggaactgttccacctcagataatcaggcattcgattctcataaggagcatgcagcctagatccctcatatgtgcagttcacaatagggttcttgctcctatgaaaatctaatgctgctgctgatctgacaggaggcatgaactcagatggtaatgcttgctcacctgccacttgcctcctgttgtgtagctcagttcctaatgggccacagtacccagtctgtggcttgtgggttagggacccctgctatagaagactatgatagaacggtattataggccatgtagaccattatagagcattaaaacacaacagaacatgcatttacttcaaatgcacatggaacattcaccaaaatagaccatattctggaccataaaacaaatattaaccaatttaaaatagttaaaatcttacacattatgttctctgaccttaacagaattaaactaaaaagtagaaaatcccccaaatgcaaaaacacacttctaaataacccgtggatcaaagaggaagtcacaaggatattaaaaaaatattttgaattaaatgggaatgaccacacaacatattgaagtttgtaagatgcagctaaagtagtgcttaagaaaaatttttagcattaaatacttttattagaaaagaagaaatatctcagattaatgatctaagctcccactctaaaaaaccagaaaaagaaaagcaaattatacccaagcaagcagcagatggaaataatagagacaaaagtagaagtcagtgaaatggaaaatagaaaaaaaaaaaaaaggaattcagtgaaaccaaactgtgtttcatggaacatttttataaaattggtaagcctctaggcagactaaccaagattaaaagagagaaggcacaaatgaccagtatcaggaacaaaagaagagacatcattacagatcctatagacatttaaaagatgataagagaacattataaacaactttatgcctataatgttgacagtttatattgatggacaaattctttgaaagacagatactacctaagctcactccagaagaaatagataacctgattagtcctacatttattaaagaaattgacttagtacttaaaaacattgtaagaaaaaaaatgataccatatggcatcactggtgaattctaccaaacaattaagaaagaaatattatcaatgttgcagaaattcttcctgaaaaatagaatagaaagaaacacttcccagataattttatgaagctatcatcaccctgacaccacaaccaaagactttagaaaaaaactacagcccagtattctttatgaaaatagatacaaaagtccttcacaaaatatagcaaattgaatctagtgctctgtctatatatatatatagatatatatttatatatagatatatagatatttttatatatttatatatctatatatttatatatagatatatatgtttatatatagagagagagattatgtattttatatatattacatcatgaccatgtggggtttatcctaggaatgcaaggctgtttcaacatttaaatatcaatcattgtaagtcaccatatgaatagactgaagaagaaaaactatataaccatctcaatttaaaaaaaatcaacatccatttgtatcaaaagctctaagaaaattaagaatcaagggaacttcctcaaacggataaaagatgtctacaactaatatcacaatagtgtttgaatgaatgcttttcacctaagatcaggaacaagacatggttgtgcactctcaccacttctattcaacattgtactgaagttcctagccaatgcagtgaggtaagaaaaagaaacaaaagacatgcagattggaaaggaagaaataaaactctctttgcaaacagcacaattactgcatagaaattcgcaagccatcacacacacacacacacacacacacacgcacacacaaaagctactagaactaacaaggaagttcagcaaggtttgaggacacaagattaacatacaaaaataaattgaatttcaatttgttagaaatgaacaattggaaatcgaatattaaaaaaataccattaacataacaacaaatattaaatacttaggtataaagctaacaaatatttgcaaacctatggatgctggatgctataaaacactaatgaaaaaattaaaagaagacctaagtaaattagaaagattagccatgttcatagattagaagactaaatatttttgtaattaattttccccaaattgatctataaattcaatgcagtcccaatcaggatctcagtaagattttttgtagagattgaaaagctgattctaaagtttgtggaaagggcaaggagctacaatagctagtacaattgtgaaaaaggaaaacagcattggaggactcttgttatctgagttaatataaagctacagtaatcaggaccgtgtggtattggcaaaaggataaacacagagatcaatggaacagaataaagagtacagaaatagaaccacacatacttggtcaattcatttttgacaaagatgcaaaggcaattcaatggagaaggcataattttttcaacaaattgtgctggaagaactggacatgtatataaaagggaaaaaaagaaccttaacccattccttgcaccatgtacaaaaattaacccaaaatggtttataaaattaaatatacagcctaagctataaaacttttggaagaaaacaaaggggaaaattttttgtgttcttgagttaggcaaaggtttcttacataccacaccaaaggcaaaatccataaaatgaaaaactggatacattggacttcatcaaaattaaacatttatactctttggaacacagtgttaagaaaatgaaaagaaaagctatagattggccaggcacagtggcttatgcctgtaatcccaccactttgggaggccaagttgggtggatcacttgaggtcaggagtttgagaccaacctggccaacatggtgaaaccccgtctctactaaaaatacaaaaattagccaggcgtggtggtgggtacctataatcccagctacttgggagactgaggcttgagtccaggaggcagaggttgcagtgagccgagattgcgccattgctccagcctgggcaacaagagcaagactccatctcaaaaaaaaaaaaaaaaaggaaagaaagaaaagctatagattgagagttaatattttaaaacaataactgatcatgtatttttatccagaacatataaagactcttaaaactcagtgataagaaacaaacaacccaataacataacagacaaaagacatgagcagacactttaccaaaggagatatatggatagtaaatagatacatgaaagcatgcttaacatcattagtcattagagaaatgcaaattaaaaccacagtgggataccactacatgaggatatggaacaattgcaactctcattccttgttggtagggatgcaaaatggtacaaacactttggaaaacagtttggcagttatttataaagttaaacatgcatttactgtatgacccaacaatctcactcctagttatctatttacccaagataaatgaaaacatatttacacaaaaacctgtatatgaaggtttgtaatatatgaatgttgctttattcataatcaccaaaaactggaaaccactcagatgtctcagctgatgaattgaggtacatccatacaatggagtacagcttgctctaaaaaggaactaattgctgatacatgcacaatacagatgaatcccaaatgcattatgcgaagtgaaagaagccaaactcaacaggctacacaccatatgattctatttacatgacatttttagaaaatgaaacaatgaagacagaaaacagatcaagagttgcctggggatggggagagtagttgactgtaaaaggggcatgcaggaattttggcaggtattggaattgtttttgtttttttgtttttgtttttttgagaatggagtctcgctctgttgcccaggttggagtgcagtggcgtgatctcggttcactacaacctccgcctcccaggttcaagcaattctcctgcctcagcctcccaagtagctgggactacaggcgcccgcaaccacacccagccaatttttcgtattttcagtagagatggggtttcgccatgttggccaggatggtctcaatctcctgacctcgtgatccactcgcctaggcctcccacagtgctgggattacaggtgtgagccaccgtgcctagcctggaattattttatatcttgattgtggtgatggttatatgacttacacatttgccaaaacttataaaagtatacactaaaaaagggtgaattttactgtatgtaagtagtaactcagtaagtctgacttttagaaagaataatgggggagggacacctgcttgacatgaaaggaaagcatagggagctgtacgcaaagctggagaagtggaattctaaggagatggcctgtatgcatcaaactagagatgccagggccctccctgaaatactgaattagagtcttgaagtagatatgctgcacatcactgaattcatttcttttggctgctgtagaatattccattttgtttgtttgtttattttactttaagttctgagatacatgtgctgaacgtgcaggtttgttacataggtatttatgtgccatggtggtttgctgcacctatcaacccatcatttaggttttaagatctgcacgcattaggtatttgtcctaatgctctccctcctgcttccccccaccccccaacagtccctggtgtgtaatgttcccctccctaagtctgtgtgttctcattgttcagctcccatttatgagtgagaacatacagtgtttggttttctgttcctgtgttagtttgctgaaggtgatggtttgaatagaccatagttaatttatccagtcttctgttgatggacttttgggttgatttcatcctttggtattgtgaacagtgctgccgtgcattccttcacgtttcctactgagtatgcacaagcgtttttcttggtcaatatgagtggaaatgttggtcatggggtaggcgaacattcaactttagaaagtaatgccaaactgtcttttaaagtcattgcatcaatttacatttctaccttcagtgtgtaagatactctgtggattcacatccttgccaactcttactatagttattatattttactagtaaatgggaacttttatcattgcacactgtccttcattatctctataattgctttttagcataaatagcattttgtctgttaatatagccacatcagcttccttttggttattgtttgcctggcatatcttttctcatttttttacttttaatctttctgtagcaatatgttttaagtctgtcttttataaatagtatatagctgaatttaaaaaaaaatcattctgaccatcgttatccatttagcatttactgtatttacagttattctaattactaatatattttgataatatttcttccatctagactgtttctgtttgtgccttgccctgttttgttgctatttcattttctttcctttattgtcttcttttgaatagattatttttcctcattatacttttattcctctattattttggaattgatacattccttttatattcttattgtgattagcttcttattttcacatgcatatattacttatcaaagtctaaagttaataaatatctgtacttttccctttaacagtataaaaacctcagaacattttaactccatctccctcctgatgtaacatctatttttcttatgtattttagttgtatctttttaaaaaaacccacaagacattattgttaatgttttttatgtaatcagaatttgttatattagccaacagatttgtcactgtctttgctcttcattccttgttgcatctctgactttcaatactgcattcacttccatctccctaaattatattctttcaatttccactagtacaagcctgtttctgctggtggtaaactctttcaacttttatttgcctcaaaatgtgtttatgtcctgacttttgaaagttatcttgtcagcacattcaatatattatttcattgttttctagcaattatatctgctattgaggagcctgtggactattgaggagtcagtggtagatagtggctaaaattgtggatgaaaacaatttgtcttttgtttcctctctagttgaaataagttctttttgtcttttgtgttctacaggttcattgtgatgcatctaggcatataggtctttttatttatcctgctttgtatttattgggattcttgaatctgtagaccaatgtctttcatcacttctgagcaacctcatccattgtttatatgcatttagtagaaaacaggaacattccagtactttgggaggctaaggtgggtggatcacgaggtcaagtgttcaagaccagcctgactaaaatggtgaaaccccgtctttactaaaaatacaaaaattagccaggcgtggtggtgcgcacctgtaatctcagctactcaggaggctgaggcaggagaattgcttgaacccaggaggcagaggtttcagtgagccaagattgctccactgcaatccagcctgagtgacagagcgagactcagtctcaaaaaaaaaaataaagaaaaaagaaaacaagaacaattgataataagtgacgtaagcctaattaaacacaagaagacagaaaaagaaaagcagtaaactgggaaaaaaaatgaaaggaaataatgaaaataaaagcagacattaagaaagtaaaaacaaaaatgacccaaaataattaaaaattggcttctttatttttttattttatatttatttatttatttattttttgagacagagtctcactctgtagcacaagctggagtgcaatggcgtgatctcagctcactgcaacctctgcctccagggctcaagcagttctcatgcctcagcctcccgagtagctgggactacaggtgcgcgccaccacgcccggctaattttttgtattttagtagagagagggtttcaccatgttgcccagggtggtctcaaactcctgagctcaggcaatccgcccaccttgccctcccaaaatgtgggattacaggcctgagccactgcgccgtcaaaaattggcttctttaaaagaacataaaacaggcagatctctgacaataatgataaagaaaggaaaatagaaggcacacgtaaacactactaaaatgaaaaaaggtcacttaactatagatacagtagaatttttaaaaaatcatagtatggtaactttgtgccaatatattttaaaatatgaaatgaaaaatttcctagaaaaatgtgaactaccaaaaataacttgagaaaaaataacaaacttaaaacaatattattagataatttgaaatggtagtcaaaaatatctctctgtcttttaaacacacacacacagacacacactcacatactctaatatgccagaggggagaaggcctcaggccttttataggcaagttttaccaaccttaacaggtcagttaattctttttatactattccataggggaaaaaaagaggaaaagcttatcaactgattttatggagctattgtaactttgctaccaaaattgaaaaagcacagtacaagaaaaaatatacatagatcaatcttatttaggaacatagaggcaaagattctaaaaaacattaacattttttaaatgttcatcataatcaaggaaaaatgtaaggaaagttcaacatcagaaaaatttagcaatataattcaccatattaacatatttaaaaagaaaaaacctcatggtctcaatatataccaaaagaaaaaaaaatcattcaatactattcaacattaatgataagggaaaatcctctggatggagcagaatagaagagaattttctgaacctgattgttgttatcaaccaaagccctagagcaaaaaatactcttagtaggggaaattttgaagcattccttttctacttctcgattaaaagcagagacaagtcaaggatgatcattgttgccaccatttttgtactgaggtcctagcacatgcaattgtcacaaagtatggaaggaagagaagagggaaggagggagagacgggaacaggtagtaccactcaggaatgcatgtgactataaatatcagaaaaataccagtggcctaaacaatgaagaatttgtctcgtacacaagaaattgggaagtgaggagcctagggatggtggcattgatcagcaggttgtcatggtgttctttctactttaccctctttggtatgtttgatttaatcttcatgcttgccacctcttggtcataagatggcttctgcagccctgggccttacatacacattccaggccagatgaaggggaaaatagtggtgtcagtctcttcccagaagccttggggtggactttcccttacatctcactgctcactgctagctatgagaaaggctgggaaagtggatgtccagggatagggttagagctaacattaggattatagacatacttatactaaataaattcttagaatgatgttatgcttattctaatccattcatggaaattctgttattctttgttggataagtatatttaatatttgagacatactaaaaacttatttattgtttatcttaagttaaaatttaactgcatgttcttaaaaaaaatttttttctaatttgctaggagttgggcatattgtcactctgaaaaaactggggctctaaaattagtaataactggccgggcgcggtggctcacgcctgtaatgccagcactttgggaggctgaggtgggtggatcacgagatcaggagattgagaccagcctgtcgaacacagtgaaaccccgtctctaccaaaaaatacaaaaaaaaattagctgggcgtggtggtgggcacctgtagtctcagctattctggaggccgaagcaggagaatggcgtgaacctgggaggtggagcttgcagtgagccgagattgtgccactgcactccagcccgggcgacagagcaagtctccatctcaaaaaaaaaaaaaaattagtaataactaccacaaaagcatacaagtttgtccagaaagacaaggattttttcctctccattaactctggcaaaatttaccaaacagatttttccagcagggaaattgagtagcaaaataggcagtgcattaggatacggttttgtaaaaatgcagacacattcctcaaatgcatgtgtctcataaaatccaaggccacatgaaataataatttagtgatagcatttctgcagacagctaagaaaattcttattgatatcattaactgtggattagccatgtgaaattacttatccttgagatctttgtcctaccaaattgtattacaattttactaaaatcctttaaaagttatgcccacttgaaaatttctcagctgctattttgtttgaacatgggaatttagccataaatctcacttttctgcaagaacctgaaagttaaacaaaaattgtactgagtctgcagacaataggaataacaaattttactggtgaatctgtggattcaaagcaggctgaacacagaatgtggacttaccttcagaagtgggagagcaaactccaaagtggacaccagggaaggagagcatagaactgaaggcaaaaactatacccttaaaatggggtcttcatacactactggccaggggatagtgaggactacaagtcacagggaagcttgccggaagccagggaaaccagagggttgtaaaaatgggttgatcaaatgcaacaaagaaatcccttttgtgaaggtgagtttcactgaaaaggctctgctatttttcctactctttaaaaaagagctgaagatattccttgcagctcagttgaggcaatctaagagaaccaagtcctcaaagtgagattctaaattatatattgatatcctttactagcatgctgtttttgatcaatatctgtcaattccttctaagattgttgttatagaaaactaacagaaaagggggttgagctgaaggaattgagctgaaagaagcctcacttcttttattcaattaaccatttaaataaattttttgttctctttcttgggctgagtagtataaggatttttctcccctgagaatgtcagacttgggcttttggtaaagggcagtcaggtttgctgctaggcagtaggagagatgtgattgagagcattatctagcatgtgggcccattcttcctcgaccatgggctaggtgtgttctctaaaagttgttgcttatagacttaactaatttcaaaaataatctttatggtgcttttcacttgtgtcacttccctcagtcatttaaattttttagaatctttttttttacacaatagaatagtccatatgtagctatgttaaatcacattttacatgaacctgggaatctggctatttaaagaaatcttctaacaaagcattttataagacagatattactctctaatttgcctgcttttaaaatgtgcctgcttttaaaatttgcctttttatctaggcagtttgcataaggcgggctgactttgtattctaatagaactgttgccctctcatgctcttggcttccttttgaagtcagtgatcatagctgtttcattgaatgaatacagaaagaaaggtagtgagcgcacagtgggtgacagagccatttgactttcaaggtgcaaacccaatagcatccaaccagtgactcagcctcttcttctggaaaaggtaacatgtactatcttcatccacagccactttcactatacctcgggaaccacctccatctccagcagaagtgaagttctttcccaagaaacaaagatcaaaggtatttatattcctcactatagaaagaaaattattcttatttacagcactttctgtgagatatttggtgatttacacgttattgagttgtaccttcaacatagaaataagtgctatttcagctgctgctggtatgcatttgactttcaaaaggggaattgtacaagtcaactctagcataatgttattggtggggtctaaaaaattcaatcatgttgcatcattgcaagattaactaaatgactggctcagcctctaatactaactggtcaggagtccagtagctattgctttgtatccaaatttgtatggtataggatgtcttattgtgaggttctactgtatttcatttgtctttaaatacaggctaaaaaggcaagatctccaaacatagaataccttaatgaagcaggggaaagaattctgtattatcattattattattattatttcaagacagagtctcacttactctgttgcccaggctggagtgcagtgcactatgtcgactcactgcaacctctgcctcctgggttcaagcgattctcacgtctcagcctcccaggtagctgggattacaggtgcctaccaccatgcccggctaatttttgtatttttagtagagacggggtttcaccattttggccaggctggtctcgaactcctgacctcaagtgacccacctgcctcggcctcccaaagcgctgggattataggcatgagccaccacgcctggcctttttttttttttttttcttttttaaccatcatgaggcactttcttttcctttttttttttttttttttttttttttgagatggagtcttgctctgtcacccaggctggcacagtctcggctcactgcaacctctggctcccagattcaagtgattctcatgccttagcctcccgagtagctgagattacagggatgtaccaccactcctggctaattttttgtatttttagtaaaaacaaggtttcgctatgttggccaggctggtctcgaactgctggcctcaagtggtccacctgcctcggcctcccaaaatgctgggattgtaggcataagccaccacaccgggccaaattctgtattctttaacattaactcctcacagtacaatgtaattcattcttatggagattcccccagtttaaatgtgctggacttttgtaccttgctttcttaggtttatggactgcagacagacttgtgatttttgaaacttttcaccacagaaaggagacagctggcactgtctttttctggcttaccttatgtggaaagtggtcatgtttacagctgctctcataagaaaagaaagaaagagaaattgaagagcggaacaagagaaattaatcctactgcctctccatagtagactgctacctgctcttcccagacttttatctttcaatattgaaatcatcaagaggtttcactgtaatatcagcactggtgggctgtgtccccttaagagatttccaagctatttatgtagcagcatgtcatgtgacaccccagttgccatggcaaatatttgtgtttcatgaaaaatgtgggtaaagaaaatcaatgtaaatggccaaatcccaagacagacaggccttcaggcgagtgtttggcctgcaccattattgtttcaaattcagctgtttaacaggctgtgagaaggccatgggctaatatgcataataggaacaggcggaggcacctgttttgattctcaccctgttggagcgctcaggtcccacagttttatagataacagatctacaggtaatacaaatattatgactaggttttagccagtaaatggtttaccacgaaaaaaatagttttaaataatgacatattttctgaatgctaatgagccctggctttaattttctctgttgacttcacaaagctctccccaactgctggaaacagtaatatttaatgactttttcctgtggtcccagattggtacagcatttctaaattgactcttcaatggtaaatgtaatttttcacatattttgtgggaagtgtcctgggcatggaagttaaaaggctaagagaaggacttcagtatgccaagcctcgtgatagagccagtacagacctttgatcagacaccaccacaaagcagtgtggtgccacgctagtgtcccctagaagtgggacttggcatctgattatagttgtttttgtaaatatttacttaatcaaactctttcttcaaagcaaacggggcttggcaaacagagcatcgttgtcagtgtgggaaaggtctttctaattattagctcctgcctgcgtggaaagagagaacaggctggcccagcgggtaaaatggggaagggggtgaggctctgagccttctatttgttttgtaaaattgcccatgagagtcgttttgatttaaactgtgtctcattcttcattgtaggggaaaagcagaaggtcaagaggacatcatgataggaaggtctgtaatttgtgtgactagttgaaatttagggtctgtcacctgatgtcccttccttttgctgcagggcaagagtatgggtgactgcttgacagctggagatggcaacaaaagttcgtgcttcctttgtaaaagaaattagatcatggtttcaggaaaaaaaaaaaaacatggttcatttaaagtgaaaacccttttttgcctccttttgggactgaattacttctcaggcttcagtccaaacaaatgacttagcgtccttaaaatttggctgaatcacatcaatcttcaaattcaatcaaagattttcatcttttaaaagtacacttaaaaagaaataaaatgtgaaaaataaatgcggttgtcccccagcacgtgcttatatgtgtgcatgcatataggatgcacacacacatgcaacatactgcatgtatgctgtagtacagatgggatttagagttaagctaatcctaacaactaaggttataaaaacattggaaaaatgaaatagcccccacaatatggcaagtacatgccagcaaggaacattccacaaggccatgcatgggtaataaaagtcctgaacttgaagtaggaatgcacctgattctcctttgagcaagtcacttgacttctctgctcttcactttcctcctctgacaaatgaggataaagcttccttcacatagagttgctgcaaggatcagatgcattaatgtgtgtgaaagtgttttggaaaagtacttgttatcataactcattggtccattattaagagcatcttctaggcctccctttcttggggatctcttatcagtaagaattttacagggatcttagccatctgctttcaaggaaaaagagcccgcctttggggtcacattttattcctgcagagctgtgcctagatagagctgtatttacatcaatgattacatacagtccctctgtacctagacagattgctccttggtaaactaatccgtgcaattagatccttcctcttacgtcccttgacgtcttactgtgagaaaagtgtgagcttgattctgcaggttaaaaataggatgtgtttacgaacagtaaggcattatttatctggaatatttgtaactgctaatgttgactgagcatgtcctgcatgcatggcactaagcatctttcgtacccactgaaccgtcatagcaggcagaacctatgtgctgcagttgtccccaggcccactcagttggtaaaagggtgcaaaggatccagctgacagagtgaagctccggagtttgtgctctctgcctgttccaggttatgaatgcttccacatgggtcagcttttcaaatagtactactactgctcctgttactactgctgctgttgctgctgcgactgctacttgcagctaacatatactgagtgcttactctttgccaggctctgttcctaatgtcttaagtggattatctcacttcattttcacaggatttctgtgcaataggcactattatcattcagttagtcatccaattagtaaatgacagagccaacatacaaaactggactatgtaactaccagagccccaaagcattagaaatttttataaatatcaatcatttttatggaaacatattacatttattgcatttctaaaatatattacacttctgcctaactaatataatttaatcttttctctattcaatatcatgtatacaggtaatcagtttctgtgtcttttactgttttcttcaataacagacagcagttaccacccttgctgttgtgtctgctttcatcggctccgactttaacagccttttctatcttatagctcagttaaccaaacccaatttaagaagttgaataagtttaagtcagtcaggctttgcacaggatccgaagaataaaaaatgatagtagagtttgtaatagttatttcaataaatctgaggcatccttattttcaagaatctagttcaaaggtttgaggttgttaaaattgcctgtcaggaaataaatctttttattatcttaaggcaagcataaaaactatgttaagattcactcaattttaattaatattttgataataaaaatctattttatggataaaacaagcaaacaaacaaatatttattctactataggagtacagaccaacttcatgagtgtgtttgcttctgggaacaggaagaaagaggaaggagaatgaaaagaaatacagagaggatgttaactttatatatatataacatacatatacgcacacaccacacacacacacacacacatacacacgtatatttacagcaaagacgacaaaaaattaaacaaaaatgtgtccgtggtagttttttatattattctctatacttctctgtgtgtttaaaacttttccaaaacatctccaaatttaaaaaaaaaatccaaattgaagaaaaatataaaagaaaatcctgtttcctaagccatccttgtgttgtaaaatttatattggtgtagaaagaatgggtttgggtgataacattgtaatctcaaatttggggtctcacttctcttagtcattcttttcaattgttactttctttagtattttcccaccatatacttctgatcctgtcatttagaaaactgtaattattttatgggtgagtcagctgaactgttttaatcaggcaatatgtgtgacattaaacatatcactgcccctatctgctctcatttccttctatctgtataaaaaggagattggatcaaatcagtgtttttaaggggcttccatatcctcaccctacagccccaggaaatcctcaccccatagccccagggaaagaagagaagcaaaagctcctagcaatagggggctgtaggcccctatatccacaacacttgggttttctattttacctctttgctatcaaactatatggtatttgaacaaagtgttcgaggctttaaaatgtatactttcaaaaccactagatgatatctagcagcagttttggctttaacatgtcaaatctggtgggggaataagcctacttcttaaaaggcacagggtgcctccctggctgactttgctcccagcacaatttagtctcctttcttgtcttgccctaaagggctggagagagggcagttcttaagagaatcagagctctgcaacctggagatacaaaacaagattcaaaagcaagtccaaagctatttttttctcttttagactcattctctctcataaaacttcatttaacttaccatcttaaaggaagaagagaaaagaaaaatccagacacggaaaaaaaaacaaacaaacaacccctgtggaatcttttttaaaaaacacaaatcttgatttttttttttttttttttagatggagtcttgctctctcacccaggtgggagtgcagtggcatgatctcggctcactgccacctctgcctccctagttcaagcgattctcctgcctcagcctcccaagtaagtgggactagaggcgtgcaccaccacacccagctaaattttttttttttttgtatttttagtagagatggggtttcaccatgttggtcaggctggtctcaaactcctgacctcaaatgatctgcccacctcaacctcccaaagtgctgggattacaggcgtgagccaccattcccagcctaatttttattttttcaacttttaggttcagaaatacatttgcagatttgttacataggtattaataagctgtgtgtcatggggatttggtgtacagattatttcatcacccaggtaataagcatagtacccaatagctcatttttggatcctcaccctcttcctaccctccaccctcaagtaggcccctgtgtcattcccttctttgtgtccatgtgtactcaatgtttagctcctacttataagtgagaacatgcagtatttggttttctgttcctgtgttattttgcttaggataatagcctccagctctatccatgttgcttcaaataacatgacctctttcttttccatggctgcatagtattccatggtatatatgtaccacattgtctttatccagtctactattgatggtaatttaggttgattccatgtctttgctattgtgaatagtgctgcagtgaacataacacatgcatgtgtctttatggtagaatgatttatagtcctttgggtatatacccaataaggggattgctgggtcgagtggtaattctgttttaagttctttgagaagtcactaaactgctttctataatggctgaactaatttacattcccactggcagtgtataagcattcccttttctctgcaacctcaccagcatctgttattttttgacctttttataatagtcattctgactggtatgagatggtatctcattgtggttttgatttgcatgtagaatcttttaaaaacagttaccattttctctaattcattagaaattgccatcctcacctatgcgttttcatcattaaactttccaaatgaattgaaattatatagttttatttgccaaacaatttttttgaaattcttgtggaacaatttttcttgtaattaccgagaaaaactacaaggactgtttttactacttttcatagcattgtctaactgaacatttttattacatgtgattaataattttgcttatatacaacagaaaaaaggttaaattatcagccaacaagataatctgtattttttcactttatctctttcattgatcaattgtgacctgatcattcatagaaaatttggaaaattcagaaaagagaaaaaaagtatagaaggatttttttccccatatcacaatcctttggtactatttaaactttggcatattcttttattggtattatactgtatattcaactctggttttactcttttcatctaatagtttatcataaacctttacatatatgatttaaaattcataaaacatttttagtggctttataatatctttattaaagatataccataattttcatcctattgcttgacattaaattataaatgttacattattaataaataattgtttttgttcttgttttgagatgcggtctctctctgtcacctagtctgcagtgcagtggcacgattgtggctcactgcagccttgacctgccggggctcaagcagtcctcccacctcacagtcctgagtagctgggactacaggcatatgccaccacgcccagctaatttttctggcatttctttgtcgagatggggttttaccatgttgcccaggctggtctggaactcctggactcaagtgatctgcctgccttgacctcccaaagtgctgggattataggcatgagccaccacacctagcctgtggaacttcttgatcaaagggtatggacatttttgtatctcagtagccaaactttgcattagtgctccaaaactcaagctataagtttgcaaataacttgtatgatcatagaacagctttgtgctgtgaacccagtccaactggctataagcttaaattttagtattcacactttcatacattcattcattcaactaatcctttttgacctttaccgtgtgccaggcagtgtactagataggcactggggacacaacaatgaatgaagcaaacctagtccttgtcctcttggggtttatattttagtgagagaggcaataatcagatatttaatataatatcaaagagtgagataagtgctatgaagaaaaataaaccagaatacatatgtaggtatagaagccacgcacggtggctcacgcctgtaatcccagcactttgggaggtcatggcatgcagatcacttgaggtcaggagttcaagaccagcctggacaacatggtgaaaccctatctctactaaaaatataaaagttagccgggtgtggtggcgcgtgcctgtaatcctggctgctcaggaagctgaggcaggagaatcacttgaacctgggaggtggaggttgcagtgagctgagattgcaccactgcacactagcctgggcagcagaggaagactctgtctcaaaaacaaaaaaagaatacatatgtaggtatagagaatatgacaaggtggagctctgtaggaattttgcaagtgttctttagtgatttggatcaaggaacgtactagatccacatttttctcaggaaacatggaatgtcaagctttactttggtgataatagcagtcctttttgaggcttgctctttttcccatacgtgtagagaaaattatgatgtgtctttgctcagagatctgggaatccaggctgcttttgattcccatcctgtcaggcttcctgtccacatccccagcaggttcaacccatccatcataattgtccccagtggtccttaactatgtcacattttctcagagaatattagaggtataacagaaaagatgaaatcaatgcagcagtaaaatgaaatgtgtctctagaaggaaatttcacatttgactgaaaatagaccatctatttacaaaatcttcttgattctattctgtttgatcttcaaccagattttgatccatcgtgtgtttttgttccatgagaatgcatcaaaggatggggatttttctcctcaggaagtgtttcagagttcaggaagactcatttgaataaagatacctttcaaagcaattgcagaaattattcctagaaaattgctgctgatctgagtggcctttacgctcaagtctcttcttttatatatctctgctcgatgagttctgtttttgccttttattctctttgtaaaggttaaggactctgacttccacttttaattggcacttaaggattacttagacagtttctagatattatgaactgagagccattgacttgcaggccccagaatactggaacactactctttggggttctctccccatgaccacctttaccattaggtggtgtgggcagtcgttcatctattttgatttcagagttactagaaagagttttctatctgaaaaatagaatacgaaaaaaatcccccaggtttttttcatggtgcataaagtgatgccattggagatagttgcctttgatttgatggctttactggctccagaagtttattaaaaagccaatacccctgcaggggtgacacattaagtcagagaggcgtagggtatcaaaattagaagtgccctgagtgatctcttaatggaaactgaaacccacagaagtggcttcccaaggccacagaggaaggtggtaacagactagattctgggtcttgttgcttctgatacaccacactatgttatgttcattagcacagtgataggaattagtttgacaaattgctttccagcctgtcaaataagaaaaaatgagctgagtgcagtgggtcatgcctgtaaccccaacactttgggaggctggggtgggtggatcgcttgaggccaggagttcaagaccagcttgggcaagatagtgagacccttatctctacaaaaaaattacaaaaattagatgggcgtcatgacatgtgccagtagttccacctactcgggaagctgaggtgagaggatcacttgtgcccaggagtttgaggctgcagcaagctatgatcacgcaactgcactccagcctggatgacagagggagaccctgtctctaaaaataataattatcgttcagtttttttaaaagaaaaagaaaaaaacagcagatcaaggccaggttggctctgatgtacaaggtggtagaaggaagactaagaagagcaaagcttagtaaggagccatatggagagttctagacagtttaggctgtgggcactggtggtacgggggtaggggtcagcatgaggtagggtggggaagagaaagcacccgatgggaaggaagaggggctgatgaaaggaaatggaagagtagcaaagacacacttcttatagtacttattctccttcctttggttatatatggatttgggttgtttaggaacagaattttgtcttatagtaacaaaaatactgtcttagaaattaagaagatctgccaactagctttgtgatcttgggcaagtcatttaacctctctgagcctcagtttccttctctatagtaaaaaccacattgactagggctaaggcactgttaaaggttcttgacacatactgtaatcatcatagcaactctgcagggacctctcatttttacagataaggaaatttaggttcagagggtgtagtaacttgcccaagagtatgtagcagatattggcaaagcttggatttgaacccaggttagctggacttaaggccaaggctaatttctctgggcccgtaatagcctattgagcaaaaggcaagggcagtgaccttcaagttcccttgtcctctaaaattcaggcctgtgactatgctgaattccggaccgctgattaggtcagctagtctctctgaatatcatgtacatcttttgaacaattctagccagctgaggtcctgatgtttattctatagaaagctcaacacattgtggacccttaacacaatttaaaagcagagtcagacaaatagcatccctggtctttgagaaagaataaggactccatctctgagggacattccattcatattctaaatgcaaactctcatttagagccataaggtgcagaaagaacttactctttttcacacagtgcaattgcctgggctaattactaatggatatgtttgggtatttgagaaactgaacattggcttttagtttcagaaggaatttagtctatccttctaggcaatggaatgattatcattctctaaagatgatatccatgtggtattatcccaaatacttggccatttgccactatgagatcctgcttgtatctgattatggatccagtttaatgccacacccacatactgtccacatacatgaaaagaacatttttcataaagacatttgtcttagaaatgtgattttctttgtggtagttatttctaaattttatttatttatttatttatttgagagacagggtttcactctgtcacccaggctggagtgcagtggtgtgattatagctcactgcagcctcgaactcctgggctcaagcaatcctctcacctcagcctactgggtagctaggactacagctgcacaccaccacacccagctagtatttctaaattttagaatgcaacactgggtctatcttttttgcttaacatctgtgacttactaacatatgtaatcatcatcctgctttcctgttttttgttttggatttagaattttgcctaaataactgctccagaaactctcaaagttatctaattagcgattacactttgcaaacaaagaacatttcccagctaattagttagagcaagatgctaataattaggccacaggtttgggcttcatgtgggccaattagtgaatacaggcatctcgcaaaggtatgattgtgacccaagaagcaccaggtgagaatacaatgttttgacagaaatccttcttggctagaaggaaaaaaaaattgccgtcaagtcagtaatatcatattgggagtacagcacatcttaaaaaaggagggaaagagagaggaaggaagagaaaaagaaaaaagagagaaaggagagggaaggggaaagaagggaaggagggagggaggaaggaagaaaaggaaggagggaggaaagaaggcagaggaaaagaaaaagaaggaaagaaagaagaaagaaagccaacaaataatagtagataagttcacagagataataaagaataacagaatgagccagaacctgaagcatggcatgacctttaatcagggctcttattcctagcaggctgtgaagcagctttgtctttacctgctcaatggatctcacaatgctgatgcactgctttaatttgggaagcctttctcttgagaggcatgtcttttcttgctccaagtctaaagtgctcccaagtgtggcattctctgtgacagatgtactacagttatgctttagctgactccaaaccgatagcttcccagtgcctgagtggtctgtttgatgtccaggagtatgtttcctttgagagcaggtctttgctggaatatcatccaagaaggtagaaaggtgtaatccctttgttctaaaacagccactgataaattttgctcccactgccacccaaggctgttctttcagaaggtctaaaatacatttgctgatgtacgtaaaaaccctagacccaccccatggaaaggcactgtctgagagagacgtgagttctctcctttctcaacttctgccaaggttgtcccattttcatagatggtcctaattccacatgtctcgctgtgaagataagaagtttcagaatattgccaagaagacaagattctctggcaaatctcccatcgatagctttgcttcttataggtctcagagtcctgttgactgaatcacacgtgactggcaggaccagccagctccatacatgtccatctgtgattattttgcatgtctgtttctcactgatgaagcactgtcattcttctctgaattctaattcctagtatcagagaccgttcctgaagggagggagcaatgtggccatagaggccatttctgttggaacatgtgccacttgtcttctaccaggagtggcagcctctcctgccagcactggtggctgctgaagggggcattacttctccaactttctcttgcccatccaagaagaaggaatttattttcatctaccaagtagcttgcattctcttctggcaccctgattagatcagaaagggatagaagcttggaaggaagattttttccctcatttttatgccttataacaactcaagttaaaagtacacaaaaagctcactgctgtttaaagtctgcttctaaagtgaaaggaaatttgcacttttggacttaacacttgtttttcagcatttttacttgagatggcagtctaattaattattgtgcggcccaggaccggagaaaagaaaacgcgtgaataatctgatatagtaatactcaacacagtgctgtggcgtaatcattatggataaattgctggggggggttttctttgagttttttgaaaactcttcaaaatgcgaagagtaataataaccccacagtttggtaaagatgggcttatacatctgagaacgctgacatgttgaaaacaatctattcctcacatacctaagcaagaagaaacaattattacagtaagttaataccgggtttactgacgagaactcagggcctgaaaatctgtaccctccctctcccccagcccctccaagccatcaggaacatttagatcttgggcagagtgtctgttttcagtagaataggttctgagaattgaaatgtagtggtttaacatagaaagtgtaaagaacaaaaaaaattgctcagcatccgagtcttagaaatttaccaattataaataaaagtattttcatagcttaaaatgtcaatacaggtgggaacaaaatgaaaagcaaatgctcccttggttttgttatcagatttgtgatcctaatccacctgggacagccccagatatgttcctaagaagaaaccagacttaagaataaaagaacacgtgtcaagagaaacctaagaatgacaaaggtgataacatataacataatgttccttgtaaaaatgacctctggatattaagagaagatggcagaagaactataaaatgctaaaaagtgatgatcttttatgaagtcagaaacaatttttaacgggcacatttgaagttatcctaaggaatgcgaagaaaggcttcgccctgtttttcagactggtggataagttgtgatcaaggaatcagcaacatgcttctcagaccatgcgtgcatgtgtaaaaactaaatcacagagattgggggtcaggtgattgtatcaaagtaaactaaatgcataattttttatgactggtttccttgaacaattttataacacttttataaaaatgttaatagatttgagtgatctctaagatatccatctggtaatgagttttaatgatatatactagctagactttcgtattatgacgtgtgtgttaaatcagtgctaggattcatatcttcccaccattgaatgctaaatgataatgtagtgtgtgtcttgaccactcatttaaaggagatcataatatctttcacttctaaaatatatttctttttttccacaggccatgaaagtcaaaacacctttgagagccctgaaatcactgtgggattatgactttttaatttatgatggtgtcatagacaatacagccccagacttcttagcattcaaggaacattttagcttagcttggggaggtattttttctctcttggaacacgtcgagaagtttctcaggaactatgctataccagaagtcaaaataaaagggaataatttggtggccctccttccagagtttgagctgacgaataaacttaccagatatgaccttctctcagtgttagaggacccagctcatgtccaaatgctgataaatcttccagggcaaaggtacaagggccaagatggaaattcggaggccgccatgaagatccaagccacatggaaatgctacaaagcaagaaaattcttcctcttttatcgccagcagaagtgggcatcaggtgtgattgccattgcttggctgttatattgccataagactcgactaaagaagatactaaaggaatcacgtcagagacacctggagaattttcgcattcgagccaaggtgcacaaggctgccagctgttaaggcagacctctttttctaaacatttcgtgcttgagcggttgtaataagttgtctctatcttccctttctctttccaactactctccttgcctcagactcccacgcctttcactcccctcaatgtatgatgcacaaaccccacatttgtttgtgcatcatagtttagccctaatcaagaatctggctttcgtgcctgcaaaatctgttgcaatttttctatagaaaaaaaaaaagtcccttcactttgactatggtagttctgtcagaaaatcaatgttttaactgcattactttttctccctatatataccttctggcactttaatttgctcagaaaaaaaaaatcctctcttgtctacattgctgtcaccactttgtcagaaagtatttaagtttgcagacagccttttaattagtgctcacaatttcatttatgtttgctttctctttttttcattcatattctgttaattaagtgagctgcctctaatcttcccctgccagtagcatcatgtagccacctaattaaattaattggggaagatgttttaagtatgtaattaaatcaattaatataatttatgcctggcttaactgtacagtggaaaaacagctgaagtttgactagatgaatccactacagcttcctgtcactgatcaatgctcttcttgatttttagcatctggcagccaactggaatcgcatcaggacctccaggaggactattatccatatcccatcattaggtataacacttttgcctgcaaatctatcagcaacctctattacccaccacattatggctccttgattgagttcaaggaaggccccttgttttattcaaattggtctcggcaggaaaatgttctcgacatgatgagagtaataacacaggaccctcgcttgaaacggcgtttaatttggggattaagcaaataaagtcattatgtgggggctgctattcagtggagaggtgatttgctgtaattcgctttcatctgtatgaaatgaactaaaaagttgtatttttccccgaaataacagataatgttttcgatcttctttaatgatagaagaacacaggcttgtatgtgttgttgctgttacgccaataagccaggatattgcttgtacactgtttttaatcaaatgtgcagtcaaaatgataagctacattctctgaaattatttagttctaattacgagcagatgggatgctttatttgcacctagggcgcctgagcaaaaggaaatgctgtgtgaacaagaataattaagaagttgaatagtgttttttgcacttaaataatctgcagtttcatgttaattagcactaatgtaattatttaattacatttatgaattggggaacttaaaagctgttgtctgaaacacactggtaaaaaaggtatgccaaaatgacattgggaatttcagaaatttgcattggagtttcttttaagacatgagctactgtcaacatgtttgggatttgtttgcttccttattttgttttgttttgttttgcatctcactagtgtgttaaatttccttggtgaggtcagatttcctaagctgacttggtagagttttgacaagcagcacaacccattgaatctctttgttacatacatattagctctttgttaaagtcttttaagtagagcaatgcattaagtgatctgttgtaacagaatgctggattgcagtttattcatattcatatgtgagcataaccagtttgtgtacttacatgtagtgtagaaacataacacatttaaacagtaatatgaaaagaaaaaacatttaaatcattatacaatataattatttttaaattagtaaaatatcaataataaaataaggcaatcttttctagactctggagtacttagatctaagtacttacagaaggttaagaaaatacttgcattgcacagagccttttagttttggtctacctcatggctcatgaaagaaatttgtttcttcttaggatctaagtgaggtataggatctgaatttcattctaagttaggcttttgttttgatgagactacttttacacacaaaattagttcacacacagaaattgcacttgtagttgattgcaaccaaagaggctaattgcagacctcattagttgacttgagtccttcgaataaggtgcaggaggctttgcttctgcaactaattgtggaccagacctgatattatatgggaaattttgttttgctttctctatacagggccccccactttgcaaagttgcttagcacaaaggtgtgatagacacaaacttctttactcctatactcccacctctgaccctcctaaaaacttccatgcagtctgctctgcagagaagcttgatacaaaggagtttccaaagaagtaaaaatttgaaagtaatcgttatgtaaactaggtaataaaaaaatttgagtgaaagtgtcttaaaatttcaaaagggcttactgaataaaaattatgtgggagttcccagcactttgggaggattgcttgaggccaggagttcaagactaggctgaacaacatagtgagaccctgttttagaaagtttcaaaaattagcgaggcatggtggcgcaggcctgtagtccttctactgggaaggctaaggagggaagatcacttgagcccaggagtttgagattacagtgagctatgatcatcccactgcattccagcctggatgacagagacactgtgtctaaaaaaattaataaaataaaataaattaagtgggagaataatctggtcaaagaagctagaaatagaaaacgttattttaaatatgatattaaaactagttttcttctggattacacatattcagtttaaataaatacataataaatatgaaagtcttccctaatgtagcaatttttgtttgttaacaacatgatacccattttaaagaaaaactgctaattatgtaatttctaagagataagaacaagctcagatttcttctcaattgagcattttaaaagattaattgcacacttacaaaagagaataatacctgggctttgatcatatagtatttgtttctacaatctttgttttggatttttttttttttttttttttgagacagagtctcactctgtcacccaggctggagtgcagtggtgcgatctcggctcagtgcaatctccgcctcccgggttcaagcaattctcctgcctcagcctcctaagtagctgggattataggcatgtaccaccacgcctggctaatttttgtattttcagtagagacggggtttcaccatgttggccaggctggtctggaacccctgacctcaagtgatccaccagcctcggcctcccaaagtgctgggattataggtgtgagccaccgcatccggccgtgctttggattttatacaaatgacttgtgaacattaaattaagtaacaacaagctgtcatctcctacctattccacagatagaattctcaaacgatgtatatatttttaaggatatagggtaccctttttttgtgtaccacatccctgggagtccttaaagaagatttcagctagatgccacaaacttctttgtctcatgcaccagggacttacctatacaattcataaaaatagaagtggatgaaagtgaagcaaattttttctctaaatgtactggaagaaaactaatctattcaatctagtaatttcatttccaaagttgagacagattcactagtcaaaatcagttggtaggattgtctggttcaggtaggcatttaacacaagttgcagccttgtcctctttttctcttgccataggaaatttgctgtagaattagctctacaaataattacaccatgctgctagccaattggggctgcactaacttgtttgaacccttcaaatgaaagctaagtagttgataactgcataatatattgtagttgtaagcatttggttatttatgcagttttgcacacatgggaataattgcattttccaaactggtgatcacagaaaggatggcctttcagtaatgtttttgaccacaaaatatttataaagtattttaaaatctgtggcttggtaatatgaacagtaagacaattaaacattgtggagtaacctctttgaaaggaggacttaggccaggtgtgatggctcacgcctgtaatcccaatccttcaagaggccaaggtgggcagatcacgaggtcaagagatcgagaccatcctggccaacatggtgaaaccccgtctctactaaaaatacaaaaattagctgggtgtggtggcacgcacctgtagtcccagctactcaggaggctgaagcaggagaatcgcttgaacctgggaggcggaggttgcagtgagccgagatcacaccactgcactctagcctggggacacagcgagactccatctcaaaaaaaaaaaaaaaagaacaaaagaaaaaaagaaaggaggacttatgaaacttgattgattgttatatatttcagatagtattcctagatataacaaaaattttagctatttttaacccacaagagaagtggaatgctgctgtcaaaaaaacctgatttgccttgtaattttataagatgataaagaaacatttttcagagtttataggctgatctcttaattggatattacatattttatcatttttattaatataattataacaaaataatctacagtggttcataacaggaataaaatattagggtctattttaagcaaaatctatcaatcaaatgagaaagaacctgaagaatcctaattcctctagaaaaaccagatgtctaaataaaacctacagactaattttgctcccagtttctttggccaagtatttcctccacttttaatttaacccctgtgcttctttactgcagcacatcacttggtgctacgtataaactcagttgctttttaaaatatattgacattaaatgagacgtgccaaatatggggctctgctgctgtgagcagtatatgaagccactgccagccaattaaacccccagggatgagttttcactctcacttctcctcctcctttaaagtaaaaatagaggtgggatttttttttcttttctccatgtaatcttttatttcactgccaattgacttgatgactaaaaagaatgtatatagttcagttccatattttccctctgtgccctattttagcaagttattcttggggttaaaacaagtagtggtcttcaaattcttctttccataaaaattatggatcctgttattatgaagttcatgaaatacagcattttccagctcatgtgtactttcacagaagcctacgagaaaggatagggaaacttacttttgtgtgcaaccgatcatatgctgaactgagaaagtcccaaatgcttatgagactcttgcttcctaactctgtgctcttctgccaagagataaaagcttgaactcacctacatttgtgaacaggggcagagtggaggatggcagccaacggcgttagatctgcaatcactttttactatgcctccacgcacactggcacctttctgctttctctactatgagctggagtcacctgatacccagttcaatgctgctttttacttttgagttgacagctcaaagacaagatggatgttgttccttccacctcaggctaggaaatctggactttcaataaaatctttgcagtcttcaacatatattttggcaagtagtatagaatccatagtttagctatggtgttgccatactagatccttgggataggtgtactgccaagacttcccagacagcatttcccagaaatatccagatctttcaggatcaggaacaaagtacacttaaactttaaaaatgctttatagcccaaacacacacatatttgtattcacccatgtaatcgaaatcaacactcatttatactggttagatcagagttggtcccgtgatcttataatatgaaattatccaattggtcttgagctatatgatgttgtaccatgaaatacagaaacagcattgaactgggtgtcaggtgactccagctcataggcttttcatgagatctattaatattaggatatgctgtagaaggaatttttcactataaaagataacatcctttacactcataaaaaatattaaaaggctcgttcagtggttctcaggacccctttacactcatcatgattattgaagaccgtaaagaacattggtttaagtggattatatctgtcattattaactgtatttgaaattaaaacagtaatttttaaaatgtttattaacttcttttaaaataacaataataagcccactaccaacactaatctaaataacatatttttgaaacataattgttttctaaaacaaaaaaaaatttagtgagaagggtaggattgtctgacaggtctgaaaaattaatggaacatggttggattctcatatctgcttctgtattcaatctgttgcaatatgttgttttggttgacacacatgaagaaaatctagccctacacagataagtatttggaaaatgaaagaataatttgtatgttttatagccttttcagatagttgtgtatattcttctttgactttatactaaactccacaatggtaattctaagtgttagttgcaatgtggaatctacaatcatattaataaactttttgtcttttgtaacttgtaagagaacaagattgaaaaaggcaaagaacatcttagtataattttgaaaatagtttttaccttgcagactccctgaaaggttctcagtatcccctagggttcccagatcacaatttgagaatcattggtaatatggtttggttctgtgtccccacccaaatcttattttgaattgtaatccccacatgttggaggaggggcctggtgggagacgattggattacaggggcaggtttcccccttgcttttcttgtggtagggagtgagttctcacaagagccgacagttttaaagtgtggcacttcccccctcattcactgtctctctcctgccaccatgtgaagaaggtctttgtttccccttcaccttccgccatgattgtaagtcttctgaagcctccccagtcatgtggaactgtgagtcaaataaaccttttttcttcataaattactcagttctttctttttttttgagatggaatttcactcttgttgcccaggctggagtgcaatggtgcaatctcagctcaccgcaacctccgcctcctgggttcaagcaattctcctgcctcagcctcccaagtagctgaaattacaggcatgtgccaccacgcccagctaattttgtatttttagtagagatggggtttctccatgttggtcaggctggtctcgaactcccaacctcagttaatctgcccacctcggcctcccaaagtgttgggattacaggtgtgagccactgtgcccagccaggtagttctttatagcagtgtgaaaatgtactaatacaactggctttagttgcatgcaatgctgtgctaaccactgagaaaagtttaaacaagagaacttccttaattttttgaaggtgaatccatttggcccatttggtttgaggatgttttcaaaactcaacaaatgtatttccatgttttctacatctttataccaaaattccctaatccccttcaatagccccccaaaaaaccaactattagttttattttaatctaactggcaattgatatactatataaataacccagatagagctgtttcttgccatcttttgggaacccaccttcttgctttctagtatcttgtgctttcacacttgcataagtaattaaagcctggttacaaccacagtgtctagatcatagttctctattattataagatgctgatatgcaatcatttgtgagtatatcatgtgtcttcttatttttctaccattagaataccaaagttttcttatgaattggagcaattccagattatctctgtatcaatgtcactcttcttcacctttcttccagtgtgctctcttgattaggagagaaagggatggagtaagcttgagtatgctgctgggaggatgtgatgcattgaacatcactgatcatgagtttcaaaatgaggaaaaggttgagaactattcctccagatcaccaaactgaggcatgaatgactaccatcccaggctagagcgatgagataaacaactactacttggtaatcaggagtctgttgttaacctcttctctgccttgaataccattataagaaataggacttgggagacaaaagaaactaggagtcacccactgggtaagaagctgagttttcaagaacgtgtgatctgctgcaacaacaggggcctgtcacagaggcatgcaccagtgccaagggggctcagtcactcagtgtggccttgctcatgttcttgggtttctgtggttactgtgaaagaaaagccaatcctagcagagctagtttgctggatgcaaagaggcaattagtgtcatctgatagatgtttatgcagaaggggactgggaaaggctgtgaaggtagaagtgaagatggagaaatgattgccagtaacccttgatgagcaaccttggttcagtgggggaccagaagtagtagatgagtaacttcagagaggcagctctcaggtaagcttctttgatgtagagacaataatatttcacaactgcttatttgagaaaagacggaactctctatcaaactaggaatattttgcgggaaatgagaatggccataagaaaagaggctgtgatcctttctatagtgatgaggaagagagagtgcctctttctgctagtgttgtattgttctgtgctaatgaggacctggaaaaagctacaaatcccacttaccattctttgaattctccagaagttctccagcttagagacccaattttagaagagttgaaagaagggggagtgatcagaacacacaggagaaagggctaagaatttaaaagacaggccggacatggtggctcatgcctataataccagcactttgggaggctgaggtgggtggatcactttagcccaggaatttgagatcagcctgggcaacatggcgaaaccctggctctacaaaaattacaaaaattagccaggtgtggtagtgtgcaccagtagtctcacctaattgagaggctgaggtgggaggatcacttgagcccaggaggttgaggctgcagtgagtcgagattgcaccactgcattgccagcctgggcaacagagtgataccctgtcaaaaaaaaaaaaagaattaaaagattttttgagtacgggcttcacacgtgtttcattcgtttatttgactggagatttcacaagtgcctgctctaacatagctaagagtctggttacaggagctagagtgatgcaggggaaagaagaaatggacaacaaagtaaacaaccaagcaaagaaatatgtaacgacaaaatgagaaaagggtggtgaagaacaggtgcaagagaatgacagtgaagggagactaagaactttagaaaagggtggtcaggcataccccatgatgatgaggaccttattgcctcaagagagacctagcaactcttctcttctgcttccctctcccacttctaaggactctgacaattacacctggcccagccagataatccaggataatctcttgattttaaggtcagttgatagcaaccttaattccattagcaactttatttctcctttgtcatgtaacccaatatattcactggttgtgggtattggaacttggacgtttttgaagggccattattctgcctactacaacaactgaaaataaaagtgagaaaagaggccaaagctctttgtcccttctggacttcttctctgctcacacttggagagtcttttattttatataactaaatttctcacaagagctaatatgtagtatctaaaccgtataataattggtaggtttatgtgaccttggacaagagacaagacacttaccttgagtttccttacctataatatgacaggattgaggttgatagtctctcagaactcccccagtgttcctaattgatacccttgaagaaatcatatcattgtagattatatcccaaagtgcaatgtctcatcgccactgggcctgtctactgaactcccacaaaccatgacatccttgttgatagtttcgtggttaagtcactgttatatttagcatgtactaccagcatagatgaaatcttttcacctgtcaacacatatactttatggatgtataaaacaaaacaagtctgacttaaaaaaatatattgactcccaacttctgctctgctgatgtcattgtacattgcgttgtatcttgtccatgtagaatggtctgttgcttgtcacagagtttgttgttgttgttgttatatgttttggaaacatccataccttgtaacattaaaataccttgtgtttataaagcactttgcagcttacaaggtgttttcttgtctgtaactgcatgtgattttctacaacaatgttccaagattagcatacacttctttaaaatgggtgtattctatgtagacattttatatgcattcttgatcagtggtaacagaggtcccaagtaatttgttggaaaactgacttcaaacactggaatggaacacagacttattcactcacatgctgcgtatgtggcaacaaagtgatcagacatcttttatattttaaattggacatcatcttaatgagacatattatactgcttttatctttacttttgaaaggcaatgcagtcatggaatgctctcaggcacttttcttaatcacactttattctttaggcattttcctgcctttttatactcttgctatatgttatccacaatacatctttctaaacatttatttgaatatagataaaattatacatatgcaaaatcccaagttacaatattgcagtcacacataaagacattggagttgtaactgcctatattagcttttatatgtggaatggttctctaaattatttgaaagattagtaatttttcaaaaatgattcgaacagctcatttgtccttctgcctctctctttaattcttaagtccagatgcaaagcaaagagagacttttagatgattgtaaagtcatttaatttccagacattgtctagtgtttaaacactgacatcaaagcaaagagccaattatcagagttcatttggtctgaagccccattgcctgaattgctatagttttccttaggctgaaaaggaaatgtgtgtcacatcttgaagatgtagtatataaaatcactttatctagagcagtttaacttgaaatgtgtgtttgggctcactaaccacaaggaggcattgaagcatctcttcaaaatgtgaaaagcaattttaatgaagaaaaaaaaagttacacctacagttgttgaatttcatataagcagttatacctgcttgtgagtatgcatgctttttaagtttatgttttgattcactttttttaatgacctgaaatatcagcagaaagtatttccgctgttgtttcttttgtgagagatttttggacaatagtaattcatatgtgttttcccttctgctacgtttccagtggaaatgaaggcaaactgcaggacttttattagtactgacaaagtaactgcattagctcttcttgccctttgaaagttaaaagttcttgtgaccgtgagcagaagctgatttctttagtatttgaattatttaaatacatattcctgacagcaagggatttatctgaaatctatgtgtcactttagaatgattctggaacacatcttcaaaataccacataagaagctcacattaagaagccaaaacgatattttttttaacctgagcataattttcttacacatccttgtaaacattcatattgcatgtcagaaattttctccatgttttgtcatcttgattcttagcagccttgttggtactgaaaaatgtgaacccctctgttacagagtatgttgcttagcacatcttccagaataatgtttaattcccccgagaaacaagcacctcattcttcgggattgggttgtttctgtaagatgcttcagagaaaattttttcctggaaatatggactgtgacattttgaaattctcttgtgccattttgctatatcgacttgctctttctgtgttttgacaccttgtttgccttttagggtattcccagcctgtgagagaacatattgccgatttcaacacacagcagaacatgcagctggggaggctgtgtgacatcttaggtacagtaaatagttttacacaaatgactctttggaatgtttatcagtggatgttgatagaatgtgttgttttgtttgtttgttttttgcttatttttttcctctacaaggaaaaagctcagatgtttaatctacttacagggcaattaaatgttttattttaaaaaacatatttgtagtaaaatcaacttgaataaaaaatgacattttaaccaatttacttgggcagttttctagattatctttgctgcaggtttggatcagaatttctctcctataaaccgaaatctttatttactgaatcttacagtgagtgaagtcaaagttttacatttgtgtcagtcttgtctcttatagtatctggggaatgtgtgaaaggtggtatcagaaatgaagcattgtgttttcataagaagaaaaaggggaaaattaagatagatttttaaaagaagcttttatttaaatatagagcatcttattattagaaaacgtgaagtgcttaatggagggaatttttagaaatacagaccttgattcagtgatgtatacatctttgtaaaagtcaggttctgatactggtttggtcagttcttaatcagacacccatctggagccaggagagaaggatgcctgaatgtgatagctttggttgacactgttcaaggcccgggttccgattaggctctaagaatataggttgcaaaagctaagcaataacattgaatctgtttgtgagatacttgccaaaaattcaaggttacacaaaaattagatttgtattagttaccaaataagaacttctttgctttgttaaaatacaatttctttggcccttatttaagaaaaacaaggaagaattttaaatgatcaaggaccaacttaactggctccctggaatgacatgctttacatgattcatatatatttcagcatcattattattttataaatgctatttggtatcaaaaaatacatcagtactagaaatttacagtgtcctaaaataataatcataattgctttaatctattatctaggcactcagattgtttttcagcattacaaaaaaaatttttaatgacttaagattgatttgttagtgctaagctatttcaactaaaaacctgactggatggaaaccactgaagtgcagcagagggcagactttcctctaatttatttgaattaatttttttcttcagctttttatatctctttctatatatagtataagccatcacgaaataatttctttataaaagattctcattattggaaaagacttgaaagtattaggcttctattttaaacaactcaataattcagtctgtctctacctgcaatggaatattttgcttatatgaacatttctgagagattatgaaccaaatgcttttttcttggtatatagtcttcatgatatagcaaggcaatcataaaaagtcttcaagaggagtaatgaaagtttagaaatagtagttagatgaagaaaaagtacttttttgtgaaataaaaatgtgaagaaaatagaaaaataagtaataattttatggaagaatacattattatcccctatggtttttcttcttattcgggggaaacaaagataatccagtcacactggtaaggcttgtcactagatattggctgtgaattcatggttctcaggtgcagaccccaatggctagtattttcagttcctagatgagttcagcaaggaagtgactgattactgaccagcaatcaaagaaagtttcatcttcatatcaattcctttccaaaattacctgtcagttaattttgaacatgtgtaaaattaacacatgataaaacccactaatactgaatcttagagttagtgatacgtattcctttgccagaaattaacaggaaaggtgaaattggcaacatgattccttttatcatttgtaacctagaaattttcttcccaagaaaaaaattatttttcatctgttacagtctgtaagctatttttgttgtttttctgccctattctttcatacttaaaaaaaactcattagtttgatttttaaaacctctactgtaatttggttagacgctagtctcttcttcaaaatacaagacttaagatgactaatttgatgattcagcaattggatgcaagttatttacttactgcctcctcagttaatttattttgaggtttatgcttcaaaattaaatgggagccacttaaatattcacatgtatggagcacctgctctgggcctagctaggtcacttcagaaaacaccccctctaggtctctagagagatttctctatgtatgtatgccctgcgtctaggtgtaaaagaccttcccaactttgcgaatctctccatcatcccttcagtcagtccagaagtgtttattgagtgactcctacatactccacactgtgccagggcttaggggaatataagaaatagtacaaacattgcctttaaggagcttggaaagacaagattaatagattggaaacaataggatagaaccacagagaacactacttcatgttaaatcttgcactgatcaaaaggaatgtaggtgtgggggcagctggggaatcactgttggccagcctagtcagggtgggccaggagcacattcacacacctgtgctgtttcttgagcacttactatgtgccagatgctgcaccagatactttctatatcttcactcatttaatagtgtctaaaactctatgccccaggtggttttgttcccctttttacagatgaagaaatgaatgcttagaaaggttaaataactagaatttaattcagtctatgctctgtatatatactctgccaaactgatcagaggagcctgaagatcctctctttgccctgcttgcctaagaaaacgtttacagtgctccctcctctgaacttctctaagtacctggtctgcatgcttcatcgtgcccacaatgattactgtatttccctccacatttagccaagggctttgcccctacagatcagtcagctattttgtgaatgaatggatgaacaaatgaatgacttcattgactgctgatttcctattcatactccctgaaatattctgcagcatggagtggatactctcatttcactattccatttggatgggatatttaattagggtttcttgctatgttacatgtaagaagcacatcttaagaaggagaaaagttaaattaagatggtgtttcctttaaaccaagaatcactagacctgctatttaagtaatgtactcctctttgggaatcaagcaagggaaaggctggtttcctgaaataattattgctgtggttataatcagaccatttatttcaacaggacattccctgaattgaccctgtcaagtccatacagaataagaaattgcaatttcatcagctttgtaaagttagtagctctgttttataatttactgaagttaatggaataaatttttaaagcagtatgtgattcccattgatgttaatgggagttgtgtggctaaatccctatgtattatttgaaagtacatttccaaggtatctcacagccctccttctgaaggaatcattgcatctatttcgttggtggtggtgttatttatattttctttagagaaatgccgaactgtaaaaaagccagttagattgctcagatagtacaaaaccaaactaaattaaccttaacctgggttttggatatgctctttattttaaactgcacaacaccaatcggatgccagagttcataatgtcatttaccttcacaccagtaattaacattgtgcctgttgtttttagatgccaatgtgaatgtcatctacatctgctcccatcatatgaatgacgagttagtgctgtattacaaaaaaatcctaagtctacatgcagccgtcaaatctgggaaccttgaggacagaagtgacctgcaggacaggttcaaaattatcacacctgaagctgtaaacatcttccctgtgagtttgtgttctaattactatggtttcagggatgcagtaaaattaaattggaaattttaataacttgcaacgctctggtacacatcagtgaaatattattgcaagtttaacagctttactgattagactactagttggtctgtaggaaataaatattccagtttaactttcagacttagtggagctacccctgcccagtttctctgtagttgtagcctaattccagttactaggtggtaccatcaagtaggtggatttataacatgtaccattcctttttcttaattttgtgtggaggacactaaggcagagaaaggctgggcctgtccacagtcacaaaactagttaggagcagaactagaccaggccctctctttgctgatccacacaggtactccgtgttttttcccctgaggggaatttggctcgatttaccatatcagatggttcctaatgaacaatgttcaggttttttttttttaattgggctgattttttagtgaatggaatgaattctgagtggaatcctattcctagacaagaaccattgggaaattcatggaatgataaaggcagcattctagaataaggcagtacaaaagatggcttaaaacgaatttccctacactttaacaagaatttaaactttccatgttaaccagccaacagtttaatacctaatggactatgcatttttgaggagactttttttggtataattaaagatagctgtgttcatttacaattgaaatgcaccaaagtcaactgtctctctatcgccaacgtgattgcatgctatacatagggaacatctatgtgttgggtgactacccattaacacttcagatgtaccatgatttgaccaaaaaaaaaaaaaaatgggggtgggggagggacctaaggaaaggcctgccaggactgggggagtttctatagcatttctactttgctggtatactcagtcaattgttgtcagggtttattcttttctaccaaaatgaagattttattttttcataactggatgcctcagtattcccctaaaaaccctctgctcagttttgtttcattggcacttctgactgtgaaagaggaaggtaaggacaggggctggggaagcaaaagaaaggacaagtgacaaatcactgccgtttatgtacattcttgggaaccttccaatatcctccaccaatgtaagaatttctttggtgcttcctagttattgcttggcctcaatgacatagttactatggacattagggtgcaaggaagaaaaagaactaccattagtgtttagttaaattcctgattttctccagccagaaaattgatctaatggctgctaactgctagtaaggagtttctgcacatctgaaatgcccatatacattaaagaggcatagaatggggaaggggcactagattggggagaaaaaaagtgagaaaactaacatttttcaaattcttagcatacagtttctttttttctttttttttgagacagagtctcactctgttgcccaggctggaatgcagtggtgtgatctcagctgactgcaacctctgcctcccaggttcaagcgattctcctgcctcagcctcctgagtagctgggattacaggtgtgtgccaccacacccagctaatttttgtatttttagtagagacagggtttcattatgttggccaggctggtctcgaactcctgacctcaagtgatccgcctgccttggcctcccaaagtgctggggttacaggtgtgagccaccgcgcccagcccagtttctcatttgattctcagaagaatgcatcaagatggaaagatagctctttttacctatctccgtttatggctgaggaaaccaagactcattttctagtccaaggttactagtaaggccagagtgtgaaccaaaatctctctaccgcagagcagtatcatgagttggaatgactgccttgctcctggatgacctgtggccttgggcaagcccccttacttctctggtcctctggtcctcatctataaaatgagatcctggattagatcatttcagagtcatcttcaactctatcatcctattacctgagaaccatacccttgctagtccactctggcttctagtggactagaagccaggagacaggcactcacagatgcacatagtataggtttacatctttgtgagtagaaacaagtaggcaaggttttaagtacttaatagttctcatagctcaagtttaaattatttgagtaattactcataagcaatcaactttttaaaaatacaaaaattaaattctcactttcaaatcagttcttgttcatgtttggtagttgctttatttgttgttaatgggtttgagagattgtatcagtgctgattttcatttaaatggatggctatgagattttttaaagcatgccaaaaatctgtttgtacatctctccaagttactatatgattcttgaatttgtaatggtaaaatgtgctctttataaaagtcattatgtctatttttagacatttcagtgtttatgaagacatcctaaacaactaccttttatctcaggtcaaaaaaaaaatcagtggtgataaattaaatgtagccataattcaatggaactagacacattttagattttgtcatctgtgttaatccactgcctggatctgatgatactgatgttctccaaatggtcatacaagacctgtgattagtgatacatcctttgccatcacttattcacatttaaatctttattaaacacatattgaacacaatactgtggcagcatcttgcctggagtctagggcatgcccgcagatgactataatacagagttgggtagagtacttgccaatagaaacacgcaaacctagaggagacagaactccatcctggctggaaatatgctcagaatgttaacattaggttctattgctgcatctgccatcccccttcacatctcaaaaacccaccagatctttactactcactcgataaaatggggaacttgtggcagcagtggcatgccaactgtgttaacggggtttgaatcctgcctctgctgtttactagctgtgtgactttgagcaaatcacttgaggctcaatttccccatctccaaaatagggatagttaattgattcagtgacatgtggatcaaatgagagatcacatgtcaaaggctttgatcttgtgaacttaccatgattgctgccttggaatcctcttctgggtgccctgaaaggctcaccaaggacatcgtaactcaagtcacccattcagttcgttttcttttacatgtcttcattggaataatttatgggaaaaagaaaagagtgaaacaaggaagaaagacagtgactaaccagatgggaaagacaaacctgccaggtgttatcactggccattgtcaaatggaacattgagtttcctagaactgcatcctcagaagtatgttttttaaatggatttaaggccaggtgcagtggctcacacctgtaatctcagcattttgggaggccaaggcaggtggatcgcttgagctcaggagtttgcaaccagcctgggcaacatgacagaactcggtctctacaaaaaatacaaaaattagctgggcatggtggcatgcacctatagtcccagctgcttgaggggctaagatgggaggatcgcttgagcttgggaggtcaaggctgcagggagctgtgtttgcaccactgcactccagcctgggtgacagagtgagactctgtccctgcttccacaaaaaaaaaaaaaaaaaaaggatttcaaattatggtagaaaaggcatatcgcatagatctaaggaacttggaatagaacacctaatctggaggaagggcccaataggggaaatcatgtaaatcctcttctcagaggagctctgttttttgccttttaaaattgtggtaaaatatatataacacaaaatttaccattttaaccatttttaagtgtacagtttagtggcattaagtacattcacattgttgtacaaccattaccactatcaatttcagaactttttatcatcccaagaagaaactctgtacccattaagcaataagtccaaaagagctcttgttttaaagggaaagttatttcagagctgaaaggaccctagagacttctaatccaacccctcatttgaatatgagaaattgagactcagaaaggttgagttttctaaatcacctagcaaattacaaattcaggactgaaatgcaggtgttctccccagtctagttctctttctcccatactcaggagttatactctccgacaatttgcaaactggtgcatctgatattccttgaaacaatcacttagcatttctccatatttttatgctgcagtgagtagataatttttcactagaattggggtagtagatgctagtctataaaaatcctttcaactcccttgagaccctggcacttttacattatattatttgcataacattttaatgactttatttttattttttatttttttgagacagggtcttattgtgtcacccaggctggagtgcagtggcatgatctcggttcactgcagccttgacctccctggctcaagcaattctcctgcctcaggcttttagtagctgggaccacaggtgtgtaccaccacatacctggctaatttttttgtagatagggggttttgccacgttgcccaggctggtctgaaagtcctgggctcaagtgatctgcctgccatggcctcccctaaagtactgggattacaggtatgagccacggtgcctagcctgactttatttttaagagggttttctctgtaataataactattaccatttgttgagtatcaatgctgtgtattatactaggtattttacatttgtgatcttattttaaaagccttagagcaaccccagcaaatgggtaatttttattcttatctaacaggtgaagaaataggctcagggggtctaagttacttgcctacattaatggagccttataagtgatagagctgaattcaaagccagacctgtttcactccaaagccccatcactttcctgtgtgccatgctgccctcttctctagagggaggaaaacaatcttggattattttattctatccttaggtaatgtctttcccatgcccatcttcacctgataaaatcccacccatccttcagaattcacctcaaccccaacctctttcataataatagtactagctaacattcattaagtctttattgtatccaaggcactattataagtgctttacatacattatctcatttaatccttacagcatccttatgaggtagatactgttattacactcattttacagatgaggaaacaggcacaaggagaatgtgtatttgccttttcagcattccccaccagcaggcctcttgagtactcggcagatccttatggcccttctctgccccatctcagttatgtgttaactgttatttgtgtccccacccctcaaaaacagaaacatggttgtgttagttttggtgtatgctgttttctctgcccccattagactagctagaattatttatttaattgaatgagacagtcacatgtattgctgagctgggactaactagtcaaaaataaaacaaaaagagtttttcactgaaaaatgaatttgagtcttgctgaaattttcaattattttctatttgtgaatcctttccagagttgttgcctagaaccatgataatcattataaaagtgcatattatctgaagcagatttagtggtagaattttggaaggagggtgtcgggtcaagtgcctttttcctactcaagcatttaaagagttgccgtggtaggaatctataaagtaaagaatgttatgaggcttttttcttcattttttgtattgattttccagacactttaatgttaaaccatgccagaagtgttgcagagatgacttgctattacccaaaggccgccagcctcttttccttctgacagaaggataattccacgtggatcaaataaatacagatgtgtagtaattagttctattcccagtgagcctatttccaacacactaaagatgtgagcgattatggaacctcaccccaacagcttttatcaatttaaactgctaaacaacaggataggtcataacccagcctgctattaataatgtatttattatgtgcaacattataaattaggtgtatggactagaaaaaaggacaccttttaacaagaataatatgatcttcccccagaagcatcatatgtgcctggccactcacctgatgtacagtcccaaggcaatcaaaagaataaaaaatctcatccgaggaacagaggcctacatcgtcagcgggctcctccacagagatgatttagctgtggccgatatgttagacatacccatcctgggctctgagcctgaactagctcatctttatagtaccaaatctggaggcaaacgtgtctttgacagtgccaatgtggcagttcctcctggaatatatgatatttatagtcagcaacaggtatgtggggtggacaagtgaagctctgttcaaatatttgaaacatcctcttgatcttggacaatttccaagtcttctggagccagacctacccaatgaagaataggtggaatatttgagttgatttgagggaatctactttatttatttatttatttatttatttatttatttatttatttttgagatggagtctcactctgtcatccaggctggagggcagtggtgtgatcttggctcactgcaacctccacctcccagtttctgtgacttccagctaatttttgtatttttagtagagatggggtttcaccatgttggccaggctggtctcgaactcctgacctctagtgatctgcccacctcagcctcccaaagtgctgggattaccagcgtgagccactacgcccagcctgagggaatctactttagaactttgtgttttaaagtattttcctgttagtcttgcagaaattgctggaatttccaaactatttactcatttggaataagcactgttaaaatgtatatatcatttggactaatctgctatcaatatttaatgctttaacatggattaattcatcatcatatcagcttgccagtcattaaataggatcctaagaaataggagagtcagttttcgctaaaagcagtgggtttggaaaactccagtgagtgagcctccccactgggtcagattgcagagggcctgtgaacagagggctgcagacttccttcgctcttcaggaagcgatcgaaatggaggaggggaaagatctcagaagggggaagtaagacagctccaggaataaaactggggaagtaagacagctccaggaataaaactgtctattttcgttttgccttggaccaagtgtgtggctatgcattcttccagcagatagtcagggtctaaaacatggggagaaatgtattagccactagaaatgttttctctttgagttagccctggcaggtgttctcccatttaactgccatctgttttcataatagagaaaattaaaagacaaatggctgttaacatttcctaacctctgtttcagtacacctcttgaccattactctgagccaatcacaaattatcccccctacccacttgttgggaaaccagagaacagtgcacagtgagtcagtttgtgagggacaatatttagggatcccctcctactctcagttgcctgatcatgatgctctgcacctcacagccactgagctcaaaaatctagcctttcaacaaatcatactttgcagagattagtttgaagatactattagcttattaaattgccagcaagtatttcactcttgttagagtattcttgggcaatgttcatgggcttatgaaggaggtttctcttaacggtatcacaacctaggacagtcgcaggcaattttagtaggagtggaatagagaggctcctcctgagctgttatgtcacttccattgtcattagccaccactggaatttgaagataacaaggtagattgcttgactctgcttcacagcagaatatctggctgttatacttattacaagcaaaataaaattttaaattatattattacacacatgtactatacattaaacaaccttcaaagctttaacatgtatgtgcaatgtttatattgagtcttgccttcatcttcactgaggaaatctcaggcaatctttgctatgaaatatttcagaaccgcatatgttgattgtagttaaagatgcaggcacatttaatgcagtaaaatctccctctagtgctagtattcagaagtatgactaaaaacctccttagagacacatcagatttgagagatgtcatttgacctatggtatgtgcaaattgtataacaataaaccaatatttcactgagttctactctacttgtttggaaaacatacatctgaggtcatcaagaattaaaatactccactgagatttttccagatagtgactaccctatctattctatctgagcatgtcagcattttgaatctgcagatggggatgaatcaataacactgactttttaccgatgtgcatcataaacttaaagctggtgaaagaaagctgcgattattttaacttaggttattatttctgactttcagttggactttagcagtatttttctgctctttaccaggataaaacaaatcacagctaaaaaaatttattacatcttttgaacagatagactcaaacagaaaaatgataaacatttggaaatagcataaagtcattttgtttaggattaatttgtttaaatctagcatgaacacagtgagcatttcctgttttgatccataaagtaactgtgaaagttctctttctggaacatgctccatgggaaatattgacagctttggttaaataatcaaaaatggagatgctattttaaagcactgttcaattttcacttaaagatagcacataattctttccagtggtgcaatctttacaatactattgatccttttcattactgtaggggatccatcaacagatgcccatttataggattctcagaagcaacaaataataggatttggaagaaatagataataattctgttagtagtcgaaacctgcaaatatataatatatctaaatatgtaatttttaaaaaatctatgccagaacacctttccttacactagcaaaagaattttatctgatgttaacaggccaaagaccatttctacttctgcaaagtgtgatcataatacagcaaaatattattaaatataaaatctatattctcaacacattagagaaataaggaaacaactttggaaggcatatttaaaaaaccttcctaggctgtgttcatcaccatatggtttgtagaccagagttctgtcatttaaacacccaaatcatcaataaacactacttgataattagggagctaagacaattttaattttcaccctcactgaataccccatagttgtatgaggtttccagagaacccaagtatggccattttgctgtctcttccacactgccatgtagtatagtatccccaggaagatttgctggacagatacaacccagaagaacagatcaggcctttaatcaaaataactttaatctggtagctccaaacctcaacagaactgtaaatcatgagtcctttcacactctttagttaaaaaaaaaaaaaattgtgggcaaagagatctgatcaaaaaagaggataagagtgtcacagaatccttccgtacagaaaaccatagccaagaacagcatgggaaggctctggagacaaaaagcttagtgttattttgttgctttctgggaagtatagactggaaagtctgataagaagacaagacagaaaaatcgttttgtgagttaatgaggtatttttctcccaggctctgccaggtgagtattacttataattaagtcatcttgctatagacttttatctgattcaaactcaccccaaatggcttattgagtgtaaggaaagtggcttctcttgctcctcttctgacttctttctctacttcacccttctccacctctctgtgggttgggataggcagcacagtaaagagggaatgagcataggttttggagtcaaagcaacttgaatggaattcctactctgctactcaatgctgtgtgattgtgggaaagttatttaaattagcagaacctcagtttatttacatataaaagaaaactagtaattgtgtccacctcatagattagggtattaaatgagaaaattcatgcaaagaactgacatgagccaaggcctgtctcctactgagagttcagttatcttagagaccattatcatcattattatgatactagagcttggagtactgttctatcccttaagctcccatgtgtttgagcccagttcttgaggaaatgttgtttcaaataaaatgtcaagtaggtgtgtattccaggaagtttgctttcacaaatgttttatctcctttatctgtcttgttctaaaatatatgtgtttatatcacacatatactaaacttggccaattggccagccaaacaaatgtatttcatgtacattaatgaggaaaaaattaaatgttttatagtttatagcagtaaaaagctcaacaaagccccaaacagttaaagttttcaagactgtaactctttctagtcttgaaacaattaaaacatcatttgaggaatcaataagtaaatgcataattctctgaaaaagaaagaaaacaatatcaagattcaattacaggcattcaaggattctttcttttgccttcagaagccagcaaaatgataatttcagaatttctcaaataagactgtgcttttaaacatgtctttggtctcattggttaatggtttcttcgcatcatatttatatcactttaaacttctttaatctgtcttaataactagaagataaccaaatgaacagaccattagaagtaaagacacatgagaagtacagcaactaagttgttacgataaaaaggaatcccaggaaatgaactgtattaaatgcagctgtgtctttggcctcacagatgatagagcagctgagtcagctgataactgatcacctgcaaatacagcgctggctctttaaaatggactctgagttccgaggaaatgggactgcattttgtgatattccttcctacctaaagtgctacaaatgggtgctaaaggagagtagcagatatggccttgaagactggagaaagaaatgggcacaagtgagtattcaatggtgacttaaacccgcagggtctgtgaacagttaggggacgaagcaaaaagttcagctaagagatgaaagtactttcctctctacttagctctgtcacctgccagcagtgcctttcttgggacctttttccttatatacacaatgaatgggattgactgagttcttttttttcttttcttttttttttttttttttttgagatggggcctcactctgttgcccaggctggagtgcagtggtacaatcagggctcactgtaacctctgcctccctggctcaagggatccttccacctcagccttctgagtagtggggactacaggcatgcgccaccatgcctggctaaatttttcttttttcttttttttttattgagacggggagggtctccttatgttgctcaggctggtctcgaactcctgagctcaaacgatacacccatcttagcctcccaaagtgctgggattacaagtatgagccacaatttgggttattttcagtgtttcttctctgggccctaaaagtccttattcacatcttgaaattgattatgataattaggaagtaattttttttatcacattcaggtaacattacaaatcttataatttgccctaagtggttcttgatcatgtgcttctaacaactgttgttgttaagctagctgtattttattatgagatagaaattctattagtgaattgttgtcacctggaagctaatgtataatagcattctgtcagcagtcatgtgtttttgaagacaattcaaggaaatttatgtaagtgctggtccctgtgagatgctgagaaaatagtacattccagccagaaaatctcccagcaaaagctgagctgtaggtaagaagtcttagcatgaatggacgtgtatagattttttccatgcacatttgtgaagggatgaatcgtacaaccttttagtcccttccaaatttgcttaattaaagtaattttatatggtttaatatataaattaaacctgccattctaaaactatcttgcttttcatccagaaatccccagtcttgcctggcttctcttaatcccaaatatctgttttggctgacctgctggttaaagcataaccgattaggaaaatcacaatgcaaattcccttaactggttccttccctaccagcatacatagcagtgggctatgcaaagtgatttgcgtctgctttgagcatcccgctacggaagtatatgaatcaagacacaagtgatagggaggggcacacttgagggaaccacattattcttggaaagtggagtgatgaataaatctattgaacagtcaggagagagagttccctttgacaaatgtgactggtttccccatgatctattctgggcttcgtttctcccctccatcagtaaatggactaaatgcagtacctgtcatggccagctttttacatattatttaaaagacaccaaaataaattactcttctagataaagataaaaacaaagaaaatgtatttaattttgaggcccatagagatttcccttatattctctttgaactggattttatttcatattgtatagattttttttaaagcaacactgttaagattaaaccataaaaatatggttttttaatttaaaacattgaagtgttaatgtgcaaagtatttgttggcttcagtatttcaaaccaataatttttaaagaattctcttgacattacactatgataaatttgaaatgtttgactttaaaaaatatttaaaatactgacatttggctgaattgtatttagaagcctcattgtgcattatttaaatttcagttattttaaaccgtagcatttttaattggcaccaaatacatttggcactgttgttaatgttattaaatgcaaagctcttgaataattaataatctaactaaatcattttttaaaacttaacaaggaaaatataattattcagaaatctccttacagtctgaggccagtgcttagccatgatctgaagccaaaaataaaaataaagtagttctgaaaaggtgcctctttttttgtaggagcctattgacattcttttgccttcaaagtgaaatcatattcggagtggaggtgagctgcagtctccattgagtgtagctattgagaatttaggattagaattctcctttgttccagaagaccatcgtaatggtgcacatttagacatcaaagcattactttacgagcacaggcatgttttaatgtcctattacagtttgtagacctgtttcttttgataatgaagatgttgtgtcatcaagcctagcctggcacatacaaaacatatgctggcaggttattaaaaatttcagcttcttgatgaaagactatcctgcaggctaagagtccagagaaagactccattctgggagaattattagaaaggagaatatgactgtaagcactaaattatgttaatacttacaaatagcatcacttgcatagcagtttatgatacgataccgtgatttttctcattggtatgttgtaggcaacagattaaaaacagtgctgtttatgggagcttgaactcttgagattctcttgcatcttatgcagatattggttttagatgtagacaagattcagtgcagactcaagtatctaatataaagatcatctgggccgggcatggtggctcatgcctgtaatcctagcactctgggaggccaaggcgggtgaatcacctgaggtcaggagttccaggccagcctggccaacatagtgaaacctcgtctctactaaaaatacaaaaaaattagtcggggctggtggtgcatgcctgtagtaccagctacttgggaggctgaggcaggagaattgcttgaacccaggagacagaggttgcagtgagccgagatcacaccactgcactccagcctgggcgacagagtgagacactgtctcaaaaaaaaaaaaaagtcatctcttttttcacctatgtaatttggaaccagagttatctggctggttatagttgagaattaaaatagtcctgaagtcagcagatgctgaaaagttgtagtcacggttaaaaaaaaatcagtagagacatgtaggtgatttttaggaaaagcagaatgttacatgatggccaaaatgaaaacagaacacactctatcatttttttcttggtgacttggtaccaagcctattctcttcatcctaccagctaacaaaacctacttcccccaacaagttccagtaaactcattcacttaagtactctgctcgttaagttttaatgaatccacactcttgcacacactccaaactccacgttccccagtcgggggtatttattttcatttaggaggaataaaggcttaaacaaaggaaggcaaacatgtaggggagaaacattcctgggtaagctcacctaagacagtttagggagacccaggcagacatttactgtggtaccagtccttgtggcttttttccatttttttctttaagggtgtcttcctttcctcaattcctgggacattggcttagtggcagtgatgctactggtgacactgctttgcaagagatctttgtagaacaatttctgtgtgtaaagaactaagccagtttactttcaagtttctctgcagcccttcgttgggcctctgttaccctggagattctgggatgtggtcttggcattactattttaccacttaatgagaaataggaaattgaactggctcttgaatgcttctagtaaacattgctattttagccctttgcaagagcagttttacctttatttgtactttgatttactttgtctgacatttgatattaatttggggatcaccaatggagaaaaaaactaattagacatttgatattaatttggggatcacaaaggtaggagaagaactatgcctggaaaaggtagaataaaccacagttgttttgcctccttttagaactaaggcagcaaacagaaaacacaattacaaaagagaatcattaaccatttcatgccatagagctccctgcatctccacctccattgtgaagacctctgtccattcagaatggccctggaactaggtcacaggagccattgcaggatggcagagctcgttgtcccgtctagaatttagtaggtatttattaggtgatcccaaagagccattgcttgtaatcacatcatttttagaaaagtttaaagataacaagattaaaaaaaatttaaaagtacataatcactgtccccaaacatagttgttttcatttttgtatattaatttctaaatatgcagtatttctttctcatagctacaataatagtgtatatgctagttaaacatcagatcttaaatattttccatgtttatacatagtcgtcacaattattagatgcataatattctctcatattgatgaactctaatatattgaacaattcaactaagttggaaatttaggctattcccagctttcattttttggcagtgggaggaaagagggaggaaagatttgtttgtttttatatttggtttttgtatacacctctttttgcttctgttgagttacttcccgaggagaaagacccaggagtagaatattttatggcttttgttacatattgccatattcctaaaaagatagtaccaatttccaaagcaactggcagagaataagaatactagttttaccacaaccttaccaccaatggatattatgaactatttgcacttttattttagatataagaatccagcttctcattgctattatttgattactagcaagggatattcttttttcatgtccttattatttgtgttttatatcaaaaatgcaagatctttattttttaatctagattttctaggttaagaaaaaatctaggttattattttttccagtcatgaaactacatataaatgattattgttcacttgtttttatatttatttttatatgttgaaatcttgatgtcttagattatctttatgtatttagtggttgccagaacactgagattaagcattttgtagatctatgaatgcactgttaaggtgttgacatttccttgtatttctttgtcatcatcatcatcatcatcatcatcatcatcatcatcaataaatactgcagagtacctactgggtaccaggtattgtgctaagcacgttacatgaattgtctcatttaaactcagaaaaaccctgaggtttttactcatttacttccacaccaatttaagatataaggaaggtattacttctgtttacagatgaagaaacttattctcaagaagtgacttgcccaaatttatagctaataaatgattgtgccttgctttgaacccacatctgactgctgctagcccagtgcttttgccacactgagccaagtacatttaggaaagaccttatttgaaagtcctgggaagtgttctccctcaggtccttgcctttgtgactcataccgtgtgctgcccttgtggcaagctttctgctttccagagatttgtgggaaacgcaaatattcctggaacacagaggccactgctctcaaatttcttccctttcctagataacagaagagctggtctccttttcccacaaggcagcaaactgggaggtgtagggggccatcaatacacacacctcagagctggagaggaggagccctgcctaggagtttctaggattcagctcttgcaacccaactgcctcatatacctggttatgtgcatgggtgatgagagagaattttagacatcaccctttggttgttcatgggaatgacagattttcaatgcctttctcaatttaatacactatcgtgatcattttagtgagcctgtaaattcccaaaaagctttgagtagcccaccttcacaatcagatgtagcattaaaaatatggtaagcatttaaaacccttgtttttagcccagtgcagtcgatcactcctgtaatattttgtaatcccaacactttggaaggctgaggtgggagttggcttgaggccaggagttcaagaccagcctgggcaatatagtgagaccctatctctacaaaaaatttaaaaattaggtgtgtgcctgtagttccagctacttaggagcctgaagaaagaggatcactcgagcccaggagtttgaggctgcaatgagtcatgactgcaccaccactctccagcctgggtgacagaacaagactcctatctctaaaagcagaaacaccctgttttttaaaaaaataagcaaccaaatattttgtttttgttttaatttttttagtctcctattccaggttgacatagtaaactgccttttaagcagaatgagtgttggaacaggctagtcattcagggtaactaagaggtagtttggcttcctggggttccatagccagggacacctaggttagactcccatgctccctgggggataactataggcaaattacttcagctctccaagtctccctttctctatctgtaaagagagattagtacctgtctcatggggaagtggtgacaagtaaatgagataattctatgaattggctagcagtgtgcttagcacataataagactttaagaaatgctacctattattattgttgttattattaccataaaattgtattataacaaaatacaggtaacattgaacaagtacatacaacttaatctttctttggtgattcagaaggttctttaggctctggtaggcttccaggatattgctgtctatgtccatcagccatcattatatggggttgtggctgttgaagatacagaatgttggttgatccagttgttcccagcctatgctttacccagacagtgccttggaaagaataagtcttcatagcagcctgctttcttatcatttagaaatataaaacagttccatttatttgaactttctatgagttgaataaagaggcttgacaaagtagagattattctgaccggaagattgcaacccagtggctttattttctggttccagttggtgtattttctaattagtgtagcagcacgtcaccacaatcattggaaagtcttaatcatttacatatttgtcttcatctctgagaatgacttagaatgttttcttccagttcagtggttattttcatgaagctgccagggttgagtttgaggtgtttctctgtgcctgaggaagatgacaggagaaggaaaattgcctccccaagtgaaatgaaagccagggtaccccttctgaggacctataataatcagctacccaagctgttggtttgtgtgtcctattgatttaatatgcttctaatcagtacataaagctatgggcctgcagtgttaatttttaatatgcttacaaagtaccctttgattttctgtcacacgttaattacagcgttttgccattaaataggaagctttgtgtaaactaattactaggtaatcattgtctactgcaagcgtgctgtttgtaccttttattttattctaaaaatgcacagatcccacagtctggaaacactctaccttccagccattagctctcactaattcatagcattattgtggtgagagtgtaggagttgtaattgttgtggtatcagagctgttaattaccggagtaaacagttgaaatggtgccaaggtctattgtacaaggcagagaaaaggaggtttaaatgttactcccaccatctggggactggaggagaggcaaatgcttgaaaacagcagtgaggcgctatcgccgcttcagctccagggttggcggccatatggatcccgaatattttgaatcaattgaatttaactaccagtttttcgcaataacagcatggaaggaaggaataaagcaaaagatgagaggaacgagaattggttagtgttctcacatccaggaagtccctgttggaggtcttttggaaaggtccgctttgctgaaaaccacagagcaggcatgggcatttggaaccgtttcagaatgagttttactctcctctgacggtgactgcgccatttgcttctggtcgtctgtccttggtgcccctcggtgagacagggatgcccttgagaaaactcagactttcctgtgactgtgccagatccaacaaaaatcctgactttggaattcactaatttaccgtcctggtattttcacaagcatggtctgtggaaagaaaacaatcaatatataatgctactacatctgcctcaagtgtatgcatctgtatgtgtggaaatatcaaacaaggcacagctcttcactctgattaactaaagtcactgcttgcccattccttttgcataaaattaaaatataaattctcctgatagtctctcatttcattccacaaacttactcctctcccccactacttgaatgaaaaatcaagttcaaagggcacatgtgtttccttttgtttttaattttcaattaaagagctttcatcagcatatgcaattttctcaaccagcgatatttctctaactggaaagaaagaccctattaccagtaatgataattatggctacttctacttatggctgattttaaaaccacatggtttctgctttaaaatattgcatgatcttagaacagtcatatgtatttacttgatatcactcttatattttaatataatttccttaaaaccattttccaatgttaaaaacgtttctaaaacaccagtcacttgctgctgtaactactttttaatatcattccccaaacatgaacatattcttctttttttaaaccaccctggattatttatctttaattgttcctttagcagatgttgaagtaattctgggagtagtgtaaacaactccctgaaagaaaaggatcgcaggccctcacatacaccatgaaccaaggacagggcttgtcggggctttgatgatggcaattttgtcccagggaaaaattttcctgcctttgtgtatgtgcaaatttcaattaagaatttcaagaagcatttaatctttatctattgaaacccccagcatgcagcgcgcacagggtgagcctagaaagaaaaccacagccccctgtggtgagaggaaaaaagatacagcaatttaagtgctggaaagttgaaagggaatgaacctctctagtgtttgtggtcgggggcaaagcagttgtgctgagctttggaatggaggcacaacatatgtgcctcagttggacaaaacgcttctcgagtcaaatcaactgctaggcctgcatgttggtgcaaggtggaggcctagataatgagggacagactcctcgagaagcagcgagtggataatgctacataagtatggaattatataccgcattttcaccattctgtttaatgagagccgccaccacagcgaatcacttgccacacagccgaaatgggccattagctatcgagggaaaattgtctttgccgctttcagcagatggagcaaatattttacaaagcaattttacataccaaaaacatttgtgtgccttggtaatgttggctgttttacattatgttaccttctacagcagcataattttccatctcatcgaaggcaaagttggcatttttgatttttaaattctcaattaacaattaaacatggagtattaaagcagtccttaaactttaagtaggtgtgggaagtagtttatgacttgccaaagacattttcattttttcttcatcctctcagcatatttttgcactctaaagagggactatttctaataatcttgatggaaaggaatgagtggaaactccactgctgattgcagaatgagagttaccagtgcacacagtgatcagagcatttgctggcttaaaacacccatcatgggttgtggatacacaggttgattcccccatttgcatcagtttaaaatgttttaagtttcaagtaacagaaaacccaactcaaaatggctttttaaatgatgagaatgtattatctcaaaatggctttaaaaataaagagaatttattatgtcagctaactaaaaattcaaacattggtctggcttcagacaaggctcaatgatgtcaccaaggacccagttactttccacttctgtatactacactccattctaaggctggccatccttacggttacaagatggctgccagtagctcctgcagtttgtccctgctcaaggcaataggaagagagaacatctcatctggtagcattctcagaagagcataaagctgctttctcagaagccccaggaagtgcttcctaatatttgattggtctaattgggtcatttgcccatcctgaaccaatcactgtagccaggatgtggctttgctcatcagggccaatccttgcagctgagttggggggcaacaatctcaatcaactcacatagttaggcatggggaaagtattggtcctgaaagaagtttggaatattattaccctgaaagaggggacatagatgctgggcagccagtgacaaaggcccatgctaccatattttcatacatttgacagcactgacttagcatcacctgtggatgatataatccagcccagactgagcacttgtgccttgatggcagttaccagcacagattccactgcatcatggcacactggtagcaattgggtttgaatccctgttttgctactttatggcagtgtgacatgaaaaggggatgacactgtctacctcagagagtggctgagataataaatgtaaaccacccccaccccacccctgcacatgcctaccatatggtgagcttttaattattaaaagcttttaggattttaataaagcctaaaaagtgactaaaatgtatcctgtgcacagggaggcagcccttctaaattcaccctcaaatttggaacccctcccttctctcaatctgtaccactagctgattcaaatccggagcacctttcatggtgctccccactttacactctgaagaggcagcagggccggtggggagcacttacccaggagtcagaggcagccagagagcacctgcggcctcccagtgtgactggagaagccctcgttccctcttttgtgacatgaggcatttgtcctagatagtccacatggctcctttcaacactgacagtcttgcttactttttcaggtcattgtcttgcccttttcactctccagtccttcatgtagggatgtcagaaagcatctagaaatcagaaccatgtaggcaggtcccttgattttcttttgaacaccatcagtgtctgatatgggagatttgaggtgattaaccaaaaagttattaattcaccactgcagattggcacatgacccaattacaccaatgtgtgtctgtatgtgtgtatgtgtgtgtaatacacacacacagaggcactcttggaatttacttggttggggaagctaactctgtagagtttgaagtagctttagtcattgagtgcagtattaagctttagtcactagctttagtcattgagtgcaatggagagtctactggcttcccctaagatatcctgaatttcattcattcagacatctcttccttcaaatttacactttcttgatagaaaaagagagagcaagaggcaagttacatacttggtagacaagaatctctggggtgcatcggccaggctggtggagccccatgctttctgcagatgtcttggaaccttccaacgtcctgacgattgttgatgcactctgagaggtaaatgtgggcactggaaaaagtggaggcaagcctgtgcagtggcaaagatggggctgaagtttcttctgatgggaattgccctagagctatcagccccacaaagctagccgctaattgcattcccagagccagtgcaatcatgatggaatgaaaatctggaattctgacttttttcaaaagtcaagtgtattttttctagcacttgtttattatcaacaaggtatatatttttatttccacacttcccaagtcattagctctaaatgatctgttcaaaatggataatagcctctctgaaacactgatgtggtcgcccatcgtccatcaccttgttgttactcaatgcaaagcaaaaaaaacttcctaactactcatttcacaagttgttgttgtctttttttttgtttgtttcttaagagacagagttttggttttgttgcccaggctggagtgcaatgacgctatctcaatttactctaacccctgcctcctggattcaagcctcagcctcccaagtacctgggattacaggtgcccaccaccacgcccggctaatttttgtatttttagtatagacagggtttcaccatgttggtcaagctggtcatgaactcctgacctcaagtgatccacccacctcggcctcccaaagtgttgggattacaggcatgagccaccgcgcccggcctcatttcacaagtttttgagataaagaagatgtgcccctgttgctggcttataacagatattcaatatatatacactttgggaagatagaaaagggaggaagaaagcaagctagcaatggttcccctaactctgttattttctgtctttcatcatttgttgaagctcactgagtgatcttacacaagcctcttcattctaagtgcctcagctcccattttaaagcaagagaaataacatggtagtggccactgcagagtgttgctgaaagtactgaatgagatcatgaatgtgaacctgtgatgagacaaagtattttacaaatagtattctaatgattcacatgaattggagtgtttgtctgttatggaaggtgtgtgtgtgtgtgtgtgtgtgtgtgtgtgtctgtgtgtacataagtttgttttgaacaaaataaacttgaatagctacagatcttcccttaccagcatctgcccttaaagttgtggcaattatgtttgaactatgcaaaatgacaaaaaccagagaacagaaagccccccaaaaactgagagcttgcatctgacgtcgatagacccattgtggctgttgggaccttgttgcttcttgggaaaacagtgttcttagcttgttaaaccactgctgcgatggagtcctttgctcctggatttgagctctggcctaacccaccagttcacaagcagcttctgagtaccagcagaaaccagactgtaaagggttgttttgttggggggataaaataaaatgaagcttttaccaagaatgtcatttttctgaccttacttgaatatatgagctgcaggtcctgctgtatttttttggtttgttttgtagggataggaagacaattttcattggtgctgaggccattcttagtataatccttgtttttcccatcagacactttcaaaataaagaaataaattaaacagttaatacccctctcctcttacctcgcattattcctctccatgccttttttcttagagaatgaatcatggccccaagctgcctctgtgtgccccagcatccctactgaatgtcaccccgccagtgccttcagctgtgtacctctcatggtaggacacgattactcctccagattccagcagccgactttcctctaggaaatttacctccttactggggctttgtgcacagtgaaaactccaagcgtcaaagcagaatggctggctttgtgatcagaggcggtggcagaagcctggcacagtgtccagatgccacacacaagcagcaggctgatgagttacttattggccctcacatagtatgttgcatctgaggtgacacttcataaatgtgacctcgtttatcttcccgatgcccttcagaggcagggaatcccataaagtccgcccaggaagaatttgtggttctttagcagccttccctccagctgcttcctgagcagcaaggaggaacccattgagaggtttcacgttttatcttattctgtaacttcagctttaaggactacgtcctatgtttaccaccatcgtgactcattctgcagacatttagtgttccctgtgctgggcactgggagactgacctcaaagccagtggccatgccattaagcagccccaagagagctggagagcacggagaaagctttctctcccaattgaagagaaggcttcctggaggagctgtggctggaacgacctcaggaaggatgaggaggagtcagcaaggggaggcagaggagggcaggttagggggaggctgggagctgagcaggaaagtgaggccacattaggagccagaggccatatcacagaggaccttcctcatctgtcatgttgaggagtttggacttgatcctcaagttgaaggagatctcctttcaagatttacgtggcaagggttttacctgctccttcactgccttttctccctctctccccaacaccaaaaaaaaaatatatatatatataatataatatatatatgtgtatatatatcacttttttactagttcagttgcttaaaaggcctgacattctgtaatttttgctatatagatgaatgaatgaatgatttatctttggactgtcttggtatgaatgaccacatgtgtataactgagtagatgatttcacattccccagcagtggggcagaaaaggccatttaatcaaggcagaacaaagcaattcccacttgtctgagagagggcccaggctgtgagacttcctttccttgccattccattttccagagaagagtgggattctaacgccgtgtttcattgtcccagctttggggcacttcataaatcagagacagttggtcttccttgataaaatggaatggttttaactgaaacaagtgtaaaacaaaagaaagatggatttgggggactgttcagagaaggaacaaagaaggggtccgggttgctggagctgtgcatttcacatgcttgtttataatttagatgcagggctttggggcgatcaggtaattcacagtaaagatcagagaaaatgtgcacagcgtataggatatgaagggagggaaaaggcccattgctttgacagcagtttccttgtctctgcatcacaagacagagctctctgcatgaacgcttccccagcccttcttaacagacctcctcccactgtgcagggagtcgtcctgagctgagtgtgagccagggcactctccgcttctcagggcagttctgttttgtatgtcaagcacttactaagataactaatgaaactctcccaccaagattttctggatatttcggaagttattcagattttttgaacccgctgagggcatagtgtcagatgtttgtcttctactgtgggttgtcagtgggcactggacctagaatcaaccagctgttccaaggagttggggtgagcagtgcatagaggacaatcactttttaatggtagggaaattggaaataagtgtgtgtgatttctaatattccaatcccacccccaaagctgatcccttcaaattactgcaccatcactcagattcagaagttcccctgcaacctaaagtaaatctgagtttttcttgtcagtgctccatattttgaatatgaatattgtctatcatatgagtttcgatccagtaccctgtctcacttctggcagaaataaaatctgaagaataaaatcaaatctaaaaaaaataaaatttttttagaattagccatgcatggtggtgtgtacatgtagtcccagccatttgggaggctaaggcaggaggatcatttgaacccaggagactgaggctgcagtgagctatgatcacaccactgtactctagcctaggtgacacagcaagaccctgtctcaaaaaattttttttaaaaattaaaaaatatatggaggtgtccaggtgcggtggctcacacctgtaatcccaacactttgggaggccaaggcgggtggatcacctgaggtcaggagttcgagatcagtatgaccaacatggtgaaaccctatctctactaaaaatacaaaattaggctgggcacagtggctcatgcctgtaatcccagcactttgggaggccgaggcgggcggatcacctgaggtcgggagtttgagaccagcctgaccaacatggagaaaccccgtcactactaaaaatacaaaattagccaggtgtggtgacgcatgcctgtagtcccagctactcgggaggctgaggcaggagaatcacttgaacccgggaggcagaggttgcagtgagccaagatcacgccattgcactccagcctgggcaacaagagcaaaactgcgtctcaaaaaaaaaaagaaaaaacaaaaaacaaaaacaaaaaaaacagttaaccccacattttatataaagggaaactgaggcccagaatgagaaaagatattgcccaaggacactctgctggtcaggctgccagctgcagtgggtctgaaacctcgtttcctgatgcccagagagaagggtgcctttcagagacaacaggaacaattaagaatttttagggcgccaaatcacttttgaaatatgaaaactgaaatggctgaaaaaagagagaacattttcaaaatggctttctgactctgggtaaacagtaaccacattttttttgcctgttggaggcctggtttttaatcactccacaagcagttttcatttctgtagtaaaattgcttgtggttctatttaatttgtttctgcaggagccagctttggtgaagatctctgaggagctggcgggcattttagcacagcacgcacagccagtcaatgagaaacggttcccgacgtggaggaaattcctccaaacatttctcagtcaaggtaaataagactgtaaagtttctattgaggattagtctacacaaccttggattctagttttgggtcaactggggccaatttaaatactttgcatctcctgtgttggtttagaaaagtgctcctacggttttctttttcaaatgttgcctaaatatttatcttacacccagcctcttaagtaaataagaacctagcatgccaagcatggcatgggaagctcaagattctgggcctttttttacactacaaacttctcctgagaggtgggctttggaatcagattacctgggtctggaccccatccatgaccttgagcaaggttcttaaacccaccaaggctcgtttcctcacttacctaccttacagggtcattgggtggattcaatgaaatacagatatgaaagtttctaccacagaaccttacacaaaatcatctttaataagtgttagtttctccttctgttttctaggagagcaaaaatggtctcgcttccagttctgaatatagcatttccaaacaagggttttctacaatccaggaacaaagcgagcctccattcctttcatcctcctcctcctacttcatcctcatttcctaacaacattgggtggtctatgaatgagggaatgaatggagtgaatgatgcctgtctaccgtctcagaggtccctgtcagatgttacacagaggcacacctatgcaacggccctcagtctctaggaggttacagtgcaagacatcttacatgcttacccacatgcacaagaagaaagggttagtataacaggccagagaaggtatctttccactgctgtcaagtgataataataatctcagcaataatcaataatgataagataatgtcatgtcagatgataacagcagcagcaatagcacagtgatgataataatagtgagcttagatagtgcttattatgggccaggcactcttctaagtatatctatgttaacttttcaaagcttcctacccatcctatgaggtgggcaccattatcaccctcattttatagaggtggaaaactgaagtacaaaagattaaccccaaatcactctgctaacacgtagaagagcccatgaaaagctacctccgtgctgctccaggagtcttgagcagagccagtagttacatttatcagggcttattgtagctcaatgtatgagagtgtatgaaaggacagatctgttggttattggaatatactggctgggcagggtgtattggataccctgataatgaattatttaagcaaggggttgaatggcagccatctaacaagattgctggaaagagattctttgcaggggacagttgtgctagacaagttccaatgtcctttcaactctaaaattttgtgattctgtaaatttccacatgtacccactgatagacaagtaaggaaagtcaaccccatgcataaatggaagaaaatcaagtggctaccacacacacacacacacacacacacacacacacacacacacacaagatcaataatagggtgtttttacttttttttttttttttttgagatggagtttcactcttgttgcccaggctggagtgcaatggtgcgatctcggctcactgcaacctccgcctcctaggttcaagtgattctcctgcctcagcctcctgatagctgggattacaggtgcatgccaccatgcccagctaatttttgtatttttagtagagacagggtttcaccatgttggccaggctggtctcaaactcctgacctaaggtgatccgcccgcctcggcctcccgaagtgctgggattacaggcgtgagccactacgcccagcctaataaggttttttttttttttaagttatcgggggaagaccatgatgatctccaggcccgtccaggtcattaggaaatttccagatcttccagcatctgcctgcaaaagcctccctctaaactatttcttttcatgtgagttttgtagatgagaaaggctttcccagcgactgtctcatctgagctgtataaccacaagctaaggcttcacctctacctcctgttcatctttatcctgctttctcagccatgcttatttatggagagcagtacaagccttgttaacttaattttcttcatgaagacactgaagctcagagattggaggggacttggggaaaatcacaccacaaataagtggtaaatggaacacaaagttagatcctacaattttagtacatttaaaaaacctggttcttgaaagtcatgtgttttcaaagcttctgcctttctctcgacccagtgcatacagcaggccctgcatcaatggtccctaactgagccagggtgtctcccaggtttcccaactctaaggtcaccatctccctccctccagcttccaccattgcctgtttcattccatttatgttctctccagtgtgcttatggccacaaaatgtgctagggtttgatttctaaattgtcataggattatatcagaagcaatactttttcattttaatttttattttttgagatagggtctcgctctatcacccagactggagtgcagtggcacaattatagctcactgcagccttggcctcccaggctcaagcaatactcccatctcagccttctgagtagctggtactacaggcgcacacccccacgcccagctaatttattgtttacaattcacaatttttttgtagagacagggtctaactttgtggcaatacctttttcagaggaggaattaattgctttgagtggaaaaaaagtaacagtgaaaaggttgtggtcatgatgctgagaagatagtgcaagtaagctactttgaaataaaatacccaagtaatcttgtaagttatgaatgatagtgtgtttccactgaagcactatctttcaaaacataggtgacggctaaaggcacaaagttaaccaaagcatagagactcactaggttttttacttctgtagatttttgtcattgttgttttgttgcatttaccttgctaaatccccagcaactggtatttaggtgtagcacacacgagtaggcctcatttgaagaaaagcatgtctcaaacaaaccaaatagaaaaattaggatttgaatatgtacactccaaaatcggttttccttttgaaacttggtgtttgttaggactacctctgaccaaatttatagacatttaaggaaagtgctttttagatgaagtaacagatgactgcatttgaaaactgctcatttttttctttgtatgctattcaaagtctgtggcttacacctgtaggcagaggtcacacttctcccagcccccagcaaatttgtgaaatacaggccaagtttctcttagtgctgtcaggttctagacggcaccctatctatggaacactttgttgtttttacttttaaattatttaactctttacaaataatatcttaaagtttttctctacaaagaggacatatacagtaagatttgtaagttgggcctaaaaacagaagattggggctatgtaatttttgtggacaccactgagatagcccacaaattagccagaaagatgttattgctgtgcttgaacaccagacttgcctctatgatttttggcattcaaagcaaagggtaaaatgtaataaattataaagctctcattatcagcagagagagcatatgtgttcttcaaacacggcaatatctcttggttctatatttttaaaaatgttttataactggctttatatagaagtcctttggctgacatgatggtcaatgttctctctgcccacaaaaagcccaaacctgtcaaaccttcaaaaagcagtgaagtttaccaaaaagagcacactggtaatcaagatgtcaactgtggactatgggccgttaattccccatgagggatttgaccataattcttgggttccctgtttaataagtgggcatagacccagtgatcctcacagtgtcttcaaattataatcagaatcaaaattaccattcattgagccctacaatataccaagcgctgggctgaatactatagatagatacagtatctccaagatgcacaacaatctaatgaggtaggctttattatgcccatattacggataaagaaaaataagttcagagaatgtaagctacttgcccaaagtctttcaagacatggcagatgcagaatctgagcccaagtcaaacaaaatgcatgtgtcctttcacctactccatgtttttcccaccagggggtgtgatcgaagcattcccacctgcagacaatgtcaccaacctcacagtggacatgctgatagagcccaacgggaaaatcagcgtgctgtcgacaggggaccagcttcatgctgaaagccccttcatctcctctggtaccaccgtgcctcagacctcagtggatccccaagttctcacttatttgtgcctccaaattggaaaagcctgcagaatgagagatgtggttggttacttttcgatagatctggtgacttttatagatccaagcaccttggaacaacaggtaagttgaatggatgccatacgaaatgctaaaatatgtaatgactccgcaccctacacacctacagtacaacagggcatatgagggctcttctaaaatgcactgattctctgatgaacttgctctaaattcaacacctacatggcccatgcgaatccaagtgggaccaggctttatgtctggaaatacagggccagggttgtctcgttcaggtacagttggagttaaagagtgactgaggccaggcgcagtggcttacacctgtaatcccagcactttgggaggccgaggtgggcagatgccttgagctcagaagttcaagagcagcgtaggcaacatggagaaaccctgtctctactaaaaatacaaaaattagctgggcctggtggcatgcacctgtaattccagctacttgggaggctgaggcaggagaatcacttgaacccgggaggcagaggttgcaatgagccgagatcatgctactacactccagcctgggtgacagagtgaaactccatctcaaaaaaaaaaaaaaatagtgactgaatctcacccctcacagttcacagctcttttgattaggccctcaattctgtccattagtgttatccctatgtatcatgaaactattttatgccatccagggagtggaaccggtctagagcctgttttatatagaaaatcaatcactagaaaggagttaagagttcacatttctgttccttttcttatcagacaacttagattatctcatttttttctttaaaaaacgtactgagagatacctcataaatataaaaaggtctaaataataatataatcaatatcatgtgcccctgcccagcttaagaaacaaagtggtgtcaatgccacctgcagtcctgtgtactccttgccaagcacatggctcttcctcctcctagaggccaggaggaagctactgtctcatacctggggttttaattccctttcatctctatgctttcatcacacatggatacacccaaaaataatgtagagttttattttgcatgtttttaagaattttgtagatcataacattctatctattattattttactgtatgcttttgtttaatattccatttgtgagattcttcatgtgcataggtatggtgctgagatatactattcaggataaatcatctttaacctttttcactttgcttttcccacctaaaagtataatgttaaagttcactactatttcacaggactcgtgttttaaaatgtccggttgctcctctcttagtgctgcatgtccagacctctgtctaaagggcgaaatgacctcctggccttcctctctcgatatcgcgatatcctctggtcatccgcattgtacatatactttggttgttttaggatcattattctcagttttacagttctccatttcagtcagatgatggtttcaaagtgagagtttatgttttttggcagttttcagcttgttcaataatcattttccatttgccttcctgggccctccattggttttacattctgttctcaggcctgtacattgagagggaaaagaacaaactgaaggtcattcagaactctccctgtggtggaggcaggacagaaacaatgctccctggggaaatctggatggcagggatgcagggggaggaggagccaggggaggctgccctccccaagtatttgttgtaagaaagattggctgggtgtggtggctcatgcctgtaatcccagcactttgggaggccgaagcaggcagatcacttgaccccaggagttcaggaccagcctgggcaacataatgggaccccatgtctacaaaaaaatacaaaaaaattagccgggcatagtggcatgtacctgtagtcccagctactcaggaggctgaagtgggaggatcacttgatcccagctcactgtagcctcaacctcccacctcctctgcagtgagccaggatcgcatcactgcactccagtctgggtgacagagtgagaacctgtctcaaaaaaaaaaaaaaaagaaagaaaagaaaaaaaggctgggcacggtagctcacgcctgtaataccagcattttgggaggcgcaggcgggtggattgcttgaggtcaggagttcgagatcagccaggcgtgatggtggatgcctataatcccagctgctcgggaggctgaggcaatagaattgcttgaacccaggaggcagaggttgcagtgaaccgagatgatgccactgcactccagcctgggtgacagagccagatttcatctaaaaaaaaaaaaagaaaagaaaaaaggaagaaggagagtgagaaagagaaaggtaaaactgtggtccctgggacaataggaaggatggaactatggagacagttgacttgtggcttttatttatttgagtttggtataaggaaacttgcacacagcagtcaaaaggatcttctccaaacacgatgccagtccttccttgggcttaccacccttctgggcttctggctgaaaggtcccacccttcacttggctggttccatgtacctggccagtcttgtctcaccctaacttgccctctgttttgttctggtccatccacacaccctgtctcattccctcttactcatcatattccctctaccacagggcctaaacatgctgttcctccaccttaaatgctcttgccttttcttttgacctagttagccccttttccagccatcacatttcagctcaagccacattgactgaagcgcttcctgaccttcctgacaaagtcaaattctccttttttaggttttcatatcattgtgtagctgtgtgtgagcattcctcgtaccacttatctcagttacaaatttaaacttatttacatgactatctgattaatatttttctcctcctattaattgtaagctcttttaagcgatgtgctgtgtttctttttgctcccccactgtattctcagcacttacttctgtcctggcacaaagtaggtattcagtaaatatttgttgactgaatgaatgaacaatggaggagttctagcagatgctggatggtattgcaaggcttttgaagaaggagctcaaacattcattggatgaatgggatagatagatattagattctctgattttatcatactatgaattttccttgtcccttcccataaatacttcagtatatgatcatttgtgttatagttatcaacagaatattggaagaagttctcagtgaccacaccaaagggtgtttctgcattagcaagagaagtatgtttgttctctgtatataataaattatttacaaatcactggcatattttctagccattttgcaagtggtatcacttcagaaaacatcttaattttttttctaattgacatgccttgtgatgccattgaagcgactggcaggcatattatcaacctctcattttttgtcagtctaacaggttaaaaattttttgttttattcagcatttctttgattattagtgaagatccacacctcttcatatgtttgtttgcccatttatatatcttttcttaattgcctaatcatatcttttgccccagttaaattggactataacacaaatgttgatttgctggagctctttgtatattggaaactgtcattctttgactattatacatcttgtaaataccttctctcagattgtcatttgtggctttcctctctctctttttatttttggccatgtttctccaccataaaaattactatttctggccaggtgcggtggctcacgcctgtaatcccagcactttgggtggccgaggtgggtggatcacgaggtcaggagttcaagaccagcttggccaatatggtgaaaccccatctctactaaaaatacaaaaattagctgggcgtggtggcatgtgcctgtagtcccagctgcccgggaggctaaggcaggagaatcacttgaacccaggaggtggaggttgcagtgagccaagatcgcgccactgcactccagcctgggcgacagagcaagactctgtctcaaaaaacaaattactatttcctcccttgtaattgattagtaatattttgtagaaatgtgttccaagagtaccacaatagtgtattgcttatcaaattccacccagaaaacttagcatccattggcaactttttccactaccactacgatagtggtaattttgtatttctgtggaaaattttctggtaaaattttgtgtagaaatttctggcaatctactgcaagaaacaattttccttctccacctctcatttatgcctgtaggtctgtatgtatttatgtcagtatgaagtcatgggtttctattttatttaatgggttgtattttgatactttcattgttttgatgctcagttgttccagatttggccagtgagagacccttcagggtgtgtcttgtgtccttttgacatgtcctcatcattctttgagcatgtcttactttctgacacaataagatgttccaggctcattttctattttccttgccctggacctaggatcgactcagaagccctgtaagatctgggctcttagtgctgccattgctactggagtgtcaccccttctgagacctctcagtggacagagctagcaagtacatgtattacgtaggtacaatacatacacacagttatacacacatatatgcatataaacacacatatgtacatatacatacatctgtgcatctataactatttctatatctatcaagtgtttatattataaaaccatgagttcctgccagcatctccaatttcaatccagcacctcaaggttctttctagaattccccttttccacacttaaaagtaaatatcttgatggatatcctgcttactctgatttggggtacaattacaatgtatccacattgtatgcatgtatcaaaatagcacatgtatggccaaaatatatataactattacatatcaataaaaaataccaaaaaaaaacccaacctcatactcattatttaaacttacaaactaaaaaaaaataaaaataaaaataaaaatgaaaagctaaatagaacttggaacatagtaactgtgtatatttacaaaataaaatcccaggccagatgtggtggctcatgcctgtaatcccagcactttgggaggctgaggcaggagaattgcttgagctcaggagttcaataccagcctgggcaacatagaaaggtccagtctctaccaaaaaaatttttaaaataaacaaaattagccaagcataatggcactcatctgtgattccagctatttgagaggctgaggtaggaggattgcttgggcccgggaggtcaatgctgcaataagctgtgattgtaccactgtactccagcctgggcaacagagacccagtatccaaaaaaaaaaaagaagaagaaaatcccagaaacaggaggatcaagatagtctagagcaggagttggtaaacaatggcctacaggctaaatctgacccagcattcattttatgtaaataaagttttattggaacactaaaaaataaataacttctccaacaatgagaaacttgagtctttatccctcaatatagttacttctttgcttagtcagtttacttatttgtttaatgtaactaatctcccaaccactcctgccatcttctttgcctactctatctgtgccctacccctccatgcctcatgtgcttggatcccaatcctgtcatttgtgttttatttgtaatactcttcatcatactaaagtttcatatagtcaaatccagctgtttttcttttttcttttcttttttttgtagagatagggtctcactatgttgcccaggctggttttgaactcctggccttgagccatcctcctgccttggcctcccaaagtgcttggattacaggtgtgaaccactgtgcctggcctccagctcttcttctaaattgctatattaccttgaacttatcactttccctcattttcagttttctcagctataaaatgaggaggttagcttattttgcatctgaggtaacctacagttcaaaacagtctttatttcaataacattttaaagcacttattttctgtatcagcaaattcaaatgttaataataatcatccactttaaaaaaattatcaccaggaaataatcacaaagatttaaatacacatatattaatcacatcattattaagaatagcaaaatatttcaagtagtctaaattccaataatagatttttttttttttttttgaagcagaatctccctgtgttgcccaggctggagtgcagtggcatgatcttgcttcactgtaatctttgcctcccaggctcaagtgattcttgtgccttagcctcctgagtagctgggattacaggcacacaccacacctgactaacttttgtatttttagtagagacggggtttcgccatgttggccaggctggtcttgaactcctggcctcaagtgatccacctgccttggcctcccaaagtgctgggattacaggcgtgagccactgcacctgatctccaactatagagaatatttagagcaaattatgatagttcaatgaaattgcatactatgaagacattaaaactaatgtttttaaagaatatttaacaggaaactttatagaatagataaaggtaaaaagcagatcacaagcaatatatgcaatatgataattttataaaaagaaaaaaatatataaatgcagagttaaaagaacctaaagatatatactaagatgttacaagtcattatttctggacagcaagattgaaggtggcagagtaatggtccgctaaagatatccacaccctaattccccaaatctgtgaacattatgttgcatggcaaaaggactttgcatatgtgattaagttaaggatcttgagttgggaagagtagcttgcgttatccaggtggccccaatataatcaccagggtccttttaaaagagaggcaggccgggtgcggtgactcacacctgtaatcccaacactttgggagaccgaggcgggtggatcacgaggtcaggagtttgagacaagcctgaccaatatggtgaaaccccatctctactaaaaatacaaaaattagctgggcatggtggcacgtgcctgtaatcccagctactcaggaggctgaggcaggagaatcgcttgaacccgggtggtggaggttgcagtgaactgagaccatgccactgcactccagcctggtgacagagtgagactctgtctcaaaaaaaaaaaaaaaagagagagagagaggcagggggatcatagaaagagaaggatttgaagatgctgtgctgctggccttgaacaaggaggaagggaccatgagccaatggcatgagccaatgaaggcacatggcctctagaagccagaaaaggcaaggaaacagattctcctctagagtctccaggaggaacaaagccctgcccacatcttaatttttagcccagtaagacttctgacccacagagctgaaaaataataaatctgtgttgttttaagccaggaagtttgtggcaatttgttgcagcagcaataggatactaatatagagggtggttgctattttgttctttgtgttttctgcaaaagtaaacatgtattatagtctaggctcagtggctcatgtgtataaacccagcactttggaaagctgagatgggaggatcacttgagttcaggagtttgagatcagcataggcaacatagcaaaacccttgtctctacaaaaaattttttaaaaattagctggacatgatgatgtgcacctatagtcccagctactcaggagactgaggtaggaggataatttgagcctggaagattgaggctgcagtgagccatgatcgtgccactgcactccagcttgagcaacagaacgagaccctgtctcaaaaaaataaaaagcaaacatgtattatatttctaatcagaaaaaaatacatgaataacgataacaaaaatttgtatagaatgttattgtttgcaaagcactttcacatacatgatcttactcacatacacacaggtcttacaataagacatgggaaacagaaaactgaggtgactgcatccatttcaaattcatgcccattggccccagctgggccccataatttaccatgctgacgcaggaggggcaaaggggactgggggccaaggcaaaatagataaaatgacagcaatgcctcaaggacagtcccacaattgtgaatcaactccagaaaagaaagtggagaattctttctagacctaaggagatgagaatgaggttctagcagaatagaagaagttgtggaaatgtaagacttaaatattggaagcatcaagtagaacacacggtcattttgtaatcaaggaagaaggggctggtccctgggaaatggagatggtggagcatggtctaagattactcctgccagtggatttaggtccaggattttggtaccctagaaatggggaaattctaggccttcagagatggcacgcagagtacatggcactccagaatacacagagctacaaggcagccatgttggagatctggccttcccacataaggataatattatgtaaggggatccaagcagtaaacaaatagcagcaaaagctatttccaaatcctgatgggtcctggagccaggatcaatgataaacagtatctagtaggttctaggagggatatgaagtacttactaaaggctttaagttgaggaggatgacaagttcattgaacaaacaccttcagaggacctactctggcttcctgttaggtgctgtggaaataaacaagacatcttctgtatcatgacaaagcttatttcatatccatcgtcccattttatttgctatacatgcacacaattgttttatacttgtattgattcataggtataaatattgcctccatgagatttttttaatcctttagaaaatgtactaggccttgaattttttttacctcttcataatgtctaacacaatgatggtcatatttggccagccacctgattattatttgttgatttatggacttttggaacttctagatgatccagatcttttgtagttaattactcactttggggaaactctaaaaaaaacaagtgtttattgagcatctattatgtataagccataatgctaggtgctagagaagctacaaagatgcaaaagacatggaagtgcctgcccttagggagttcacattctagttgggaagataggcttgaaaaatgagtagcaaggaaaggcttaagtgacaactacgtagaacaataaaagagacatcaaaaaggtaatgtcagtttaacggccaaatgatttttctacatgcattcagacaagagaaagatcccttctgttgggagcaatcaagaaaggttttgcagagaaggtgggatttgagccgaaagaaaattaggatatgaggagggtaagaaagagtgtattccaagtgagaaacaggctcacttggtgggaaagagtggtgggaaaaagcacagaacacatatggataaaaatgatgatctaagtcttacaaatatcatgttggattcacctcaagtaaatatacatttatatagcaattctcccattcctgttcctcatataaaagtctctaaacaaatagattggcaaagatgctctatatgaaaattcccaaattaaaaaattctttcagaacaagatcatgtcctgcatttgcagggacatggatgtagctggaggtcattatccttagtaaactaacacaggaacagaaaaccaaatactgcatgttcccacttataagtgggagctaaatgatgagaatacagggacacatagaggggaacaccacgcactgaggcctatcaaagggtggagggtgggaggagggagagaatcaggaaaaataactcctgggtactaggcttaatacctgggtgatgaaataatgtgtacaacaaacccccatggcacaagtttacctgtgtagcaaacctgcacacgtaccccgaacttaaaagttaaaaaaaaacacacattgttctttatatttcacaggaaattgaatagatataaggttcattaattatcatagaatttagttgaacatttcctaccaatatcaatagttttttagattgtagcctcttgtttcttgaggagcatggtgatctggcttttaccaaataaaagcttcaggtgatggaaaaaggaaaaaaagttcttttagcctgggcatcaagactcatctctaaaattaaaaataaaaaattagttgggcatggtggcacacatctgtaatcctacctacatgggaggctgaggcaggaggatcacttaagcccaggagttggaggctggctgcaataagctaggatctcgccactgcactccagcctggatgacagagcaagaccctgtctcaaaaataaataaattaattaactcttattttagataattgtgaactttgaaacaacaatctgtattataagcattgatagttaatactttttttgaaaaaggaaattaaagaaaatccaagctttaagaagaattgatatgaaaactagctattggagagtagtaatggcccttccaaaacataaagttagctacagaaaggaaataagacttgtcacaaagtacagattgtgaggaaagatgaaaatggaggccctgatatataccgcagtatatcccataaagtctgaaaacgatttttaagagtttctaaatacagaatatcagcctagaataaaaaaaaatctgaaaatattttcattgcaatggcaatgggttctggccccagtctttccactaactagtgtgatactgtagacaattcacttgaccaatctgagccttgtttttttgttatcaactggtaaattcctgccctcttcctcacagtatgttctgagaggctaagcagatataaggtgatgttcttattaaatcaaatggcataaccacatgtaaaactgtcacaggagccctcagcaggtgctcaaactgtgagttgaatcagaattgaattagcattatttttaaaagtcactgagcattatcatcatctcaaagtgatatataagcatcaaaaatgaatacatttatttcagagaatggaaaaaccaaagtctacagaaatatcataattccttcttgttcactgctgtatacccagcacctagcaccctgtctagcatataatagatgttcaataaatatttatttaatgaatgaatgaatacttctctaaatccccctctagtactctcatttgcaagatctcccctatctctgttttcaagatatacaaggtattcaccaaggaagctcaatgagatttactttttctctttagggaaagtattttatttatatggaagaaggctaacagagtatatctaaattaaaatgtaatacgcctttggtattaacagaagtacctattattcagtgttttaaagtgctatagtgggcagattgttaatcacaagttaatgcctagtgaagggaaaatacatcccaaaggacttggaagcattaaagtaaaagaccttctccctttaaaagggctgtatctttgtgtcaatgaaagagacctataatatgcaagtaatagtaatgatgatggcaatgatgatgacttctacaataagcacatgggcaatgatgacaaatttttccagtgaaaattacaattctgtttcttaacactgatagtgcaggtaaactagtggccaactttgctatgtatatattaccatttgtgactgtccttaaatgtttggttaaccccccttacactgtaaaccttcacactgagaaatattgaacccaagcctaaacatcagctcttgggtaggattttggttgatctgcatataacggacctaattcctctgtttacatcagctgttcccccaggacttcctcaaaagatgcccattctcatcatggagctctttgcttcctttcaaatgaaaccaagacacctctctgcacttagggatctttaacttgaatcaccagaaacatggccagggcgaggaaaatctggacactcacactgcaccctgctgtctccagcaggtactacatttctgcaggactcaggagggcaggaggtaggaaaaaaggaaaaggctccctactaatgccaagaaagaccataagattcttcacctatgagcatttatagcttgccccagcatcccaaaacaaagctgaaagttgtttctagttccagctgtcacctgtggtcaagactttttatgtgataaattttctcttacaaaattgtccttctccgatcccagctttattgaggtataactaacccaaaaaaagtatttttatttaaggtgtacaacatgatatttcaatataatataccttgtgaaatgattaccacaatcaagctaattaacatatccatcatctcacttggatgtgtgtgtgtgtgtggtcagaagttaagatctactctcttagcaaatttcaggtatataatatgtggttattaactatagtcaccatgctatacgttaggtctccagaattcattcatcttataactgaaggtttgtacactttaaccagcatctccccatttcccccaccttccgacccctggtaatcactcatctactttctgttgctataagtttgacttttttggattccacatgtaagtgagatcatgcagtatttgtctttctgtgtctggcttatttcacttagcatattatcctccaggttcattcatattgtcatgaatgacagaatttccttcttttttaaggctaaataatattccaatgtgtatatacatgcatacatatatacacacacaccacaatttcttcatcctttcatctgtcatcaactgacacttaggttgtttccacgtcttggctattatgaataatgctgcaatggacacggcagtgcagatatctcttcaagattttattttctttggctacgcactcagaagtgggattggtggatcatatggtagttctgtgtttaagtttttgaggaacctccatacagttttccacagtggctgtactaatttacattcccactaacagtgtataagggttccctttctccacattctcaccaatacttatcttttgtcttttcttttcttttcttttttttttttttttgagacggagtctgactctgttgcccaggccagagtgcagtggcgtggctcactgcaacctctgcctctagggtttagcgattctcctgcctcacctactgagtagctgggactacaagcgcgtcaccacgcctgtatttttgtatttttttttaatttttttgtatttttgtattttgtatctttgtttttttttaattttttttaatttttttaagctaatttttgtatttttagtagagatggggtttcaccatgttagccagggtggtctcgaactcctgacctcgtgatccacccgcctctgcctcccaaagtgctggcattacagatgtgagccactgcacccagccttcttttgtctttttgataatagccatctgaagaggtgtgaagtgatatctcactgtgggtttgatttgcatttccctgataatcagtgatgctgagcaccttttatatacctgttggccattcgtatgtctttaaaaaaaagtctatatgtaggcagggtgtgtaatgcctgtaatcttagcacctcaggaggctgaggtgggcagatcgctttaggccaggagtttgagaccagcctggccaacacggtgaaaccctgtctctattaaaaatagaaaaattgtcgggtgtggtggttcaaacctgtaatcccagctactggggaggctaaggcacgagaattgcttgaaccagggaggcagaggttgcagtgagccaagactgcaccactgcactccagccttagtgagattctgtctcaaaaaaataaaagttggctgggtgtggtggctcacacctgtaatcccagcactttgggaggctgaggcaggtggatcacttgaggtcaggagttcgggatcagcctggccaacatggtgaaaccccatctctactaaaaatacaaaaattagccaggcatagtggtgcacgcctgtaatcccagctacttggaggctgaggcacgagaatctcttgaacccaggaggcagaggttgtagtgagccaagatggcatcactgcactcaacctgggtgacagagcaagaccctgtctaaaaaaaaaaaaaagtctattcagatcctttgcccatgttttaatcaggttatctgggggtctttgctattgagttgtaagagttctgcaaaattatccttaatattcagtttaacttaattttacctgtaatgtaaatgttgcggtggaaaagtacatttgctttaggctttacctatttcttaagacaatactcaatcaccccctcccagcatatggcaccactggttgcttctctcattgatcatgtccacaagactctccagaacacacaagcttgatggctccatattcaataaatgtattatcgagacccactgaaggaagccgactgctcctgcaggacccaggagacaccccaaatactgtgagtgccccaactgcggaagtaggaaagggagaccctcctctctcaaacacacacccccgcactggagaagctgaaggtctgtttgctggagaagtttctcactttacccggagctgagtcaatttagagagccaagggaaatacaggggtagaggaagaagcagaaaggccctaggagctcactgcatcccctagcagcccatttctgcctggcaccacagggatccatcaggacggtggccagagaagcaggcggtaaatctccacagggagaaggaattctctagctaaagtttgtaacaacttgaacagggtgagaagcctcctggcgagaactcaggggagggcacaaatccggtgtgcagactccataggcaggggaagaaccaagcccttttctttctagcctgcaacaagttttcaagcccgtcttgccctctgcctggaaagagactcggggctgttgtggagaggcatggtgggagtgagaccggccctttggtttgcatgggagctgggtgaggcctgtgactgctggctttcccccacttccctgacaacctgcatgactcagcagaggcagccataatcctcctaggtacacaactccagtgacctgggaacctcaccctcatcccccacaacagctgcagcaagatctgcccaaggggagtctgagctcagacacgcgtagccccacccccacctgatggtccttccctatccaccctggtagcagaagacaaagggcatataatcttgggagttctagggccccacccactgccagtccctctccacactactatagctgatgctttctggaaagcgccacgtcctggcaggcggccaaccagcacaaaaatagagcattaaactaccaaagctaagaacccttatggaatccattgcatcccccgccacctccatcagaacaggcactggtatccactgctgagaaacccatataatatatggttcacatcacaggactctatgcagacaacactcagtgccaatccagagccaggtagacttgatgggtggctagacccagaagagagacaacaatcactgcatttcagctcacaggaagctgcatccataggaaaagggggagagtactacatcaagggaacaacccgtgggacaaaagaatctgaacaacaggctgcagccctagaccttccctctgacagagcctacccaaatgagaaggaaccagaaaaccaaccctggtaatatgacaaaacaaggctcttcaacacccctaaaaaatcacactagttcaccagcaatggatctaaaccaagaaatccctgatttacatgaaaaagaattcaggaggttattaagctaatcagggagagaccagagaaaggtgaagcccaatgcaaggaaatccaaaaaatgatacaagaaatgaagggatacatattcaaggaaatagcttaaagaaaaaacaatcaagaatacaggaaacattggacacacttttagaaatgcaaaatgctctggaaagtctcagcaatagaattgaacaagtagaagaaagaaattcagagcttgaagacaggtcttcgaattaatgcaatctgacaaagacaaagaaaaaagaataagaaaatatgaacaaagcctccaagaagtctgggattatgttaaatgaccaaaccggagaataatcagtgttactgaggaagaagagaattctaaaagcttggaaaacatatttgggggaataatcgaggaaaacttccccggccttgtgagagacctagacattcaaatacaagaagcacaaagaacaactggaaattttattgcaaaaagatctttacctaggcacattgtcatcaggttatccaaatttaagacgaaggaaagaatctttaagagctgtgagagagaagcaccaggtaacctataaaggaaaacctatcaggttaacagcagatttctcagcagaaaccctacaagctagaagggattggggacctatcttcagcctcctcaaacaaaacaattatcagccaagaattttgtatccagtgaaactaagcatcatatatgaaggaaagatacagtcattttcagacaaacaaatgctgagagaattcgccattaccacgccaccactacaagaactgctaaaaggagctctaaatcttgaatcaaatcctggaaaaacatcaaaacagaacctctttaaagcataaatcacacaggacctataaaacaaaaatacaagttaaaaagcaaaaacaaaatcaaagtacacaggcaacgaagagcaggatgaatgaaacagtacctcatatttcaatactaacattgaatgtaaatagcctaaatgctccacttaaaagatacagaactgtagaatggataagaactcaccaaccaactatctgctccttcaggagactcatctaacacataaggactcacataaacttaaaggggtgaaaaaaggcatttcatgcaaccggacaccaaaagcgagcaggggtagctattcttatatcacacaaaacaaactttaaagcaacagcagttaagagacaaagagggatgttatataatggtaaaggaccttgtccaacaggaaaatatcacaatcctaaacatatatgcatgtaacactggagctcccaaatttctaaaacaattactaatagaccaaagaaataagatagacagcaaagcaataatagttggggacttcaatactccactgacaccactggacaggtcatcaagacagaaagtcaacaaataaataatggatttaaactataccttggaacaaatggacttaacagatatatacagaacatttcatccaacaactgcagaatacacattctattcaacagcgcatggaactttctccaagatagaccttatgataggccataaaacgagcctcaatcagtttaagaaaattgaaattatatcaagcactctctcagaccacagtacaataaaactggaaatcaacttgaaaaggaatctgcaaaaccatgcaaatacatggaaattaaataacctgctcctgaatgagcactgggtcaaaacaaaatcaagatggaaatcaaacaattatttgaactgaatgacaataatgacacaacctgtcaaaacctctgggatacagcaaaggcagtgctaagaggaaaatttatagccgtaaatgcctaccttaacaagactgcaagagcacaaactgacattctaaggtcacacctcaaggagctagagacacaagaaaggaaattacccagcagaagaaaggaaattaccaagatcagagcagaactacatgaaatttgaaacaaacaaacaaaaaatacaaacaataggccaggcgcagtggctcatgcctgtaatcccagcactttggaaggccgaggtgggcggatcacctgaggtcaagagtttgagaccagcgtgaccaacatggagaaaccccatctctactaaaaatacaaaaaaaatagctgggcgtgatgatgcatgcctgtagtcccagctacttgggaggctgaggcaggagaatcacttgaacccgggaggcagaggttgtggtgagccgagatcacgccattgcactccatcctgggcaacaagagcaaaactccgtctcaaaaaaaaaaaaaaaatacaaacgataaatgaaactaaaactggttctttgaaaagataaataaaattgatagaccattagcaagattaaccaagaaaagaaaagagaaaatccaaataacctcactaagaaacgaaacaggagatattacaactgacaccgcagaaagacaaaagatcattgaaggctactatgaccacctttacgcacataaactagaaaacctagaagaaatggataaattcctggaaaaatacaaccctcctagcttaaatcaggaagaattagataccctgaacagaactataacaagcaaagagattgaagtggtaatttaaaagttaccaaccaaaaaagtccaagaccagacgtattcacagcagagttgtaccagacattcagagaagaattggtaccaatccttttgacactattccacaagatagagaaagaagaaaccttccctaattcattttatgaagtcagcatcgccctaataccaaaaccaggaaaggacacaaccaaaaaagaaaactacaaaccgatatccttgatgaacattgatgctaaaatctttaacaaaatactagctaaccagatccaacaacatatcaaaaagataatccaccatgatcatgtgggttttataccagggatgcagggatggtttaacatacgcaagtcaataaatgtgatacactacataaacaattaaaaacaaaagtcacatgatcatctcaatagatgcagaaaaagcattcgacaaaatccagcattcctttatgattaaaactgtcagcaaaatcggcatacaagggacataacttaatgtagtacaagccatctatgacaaacccacagccaacataatactgaatggggaaaagttgaaagcattccctctgaggactggaacaagacaaagatgcccactctcaccactcctctttaacagtactggaagtcctagccagagcaatcagacaagagaaagaaataaagggcatccaaatcggtaaagaggaagtcaaactgtcactgtttgctgacgatataatcatttaccttgaaaaccctaaggactcctccagaaagctcctagaactgataaaagaattcagcaaagtttccagatacaagattaatgtacacaaatcagtagctcttctatataccaacagcgaccaagtggagaatcaaatcaagaactcaactccttttgcaatagctgcaaaaaaaaaaaaaaagagtacttaggaatatacctaaccaaggagtcaaaagacctctgcaaggaaaactacaaaatactgctgaaagaaatcacagacgacacaaacaaatggaaacacatcccatactcatggatgggtagaatcaatattgtgaaaatgaccatactgccaaaagcaatctacaaattcaatgcaatccccatcaaaataccaccatccttcatcacagaattagaaaaaacaattctaaaattcatatggaaccaaaaaagagcccagatggccaaagcaaggctaagcaaaaagaacaaatctggaggcatcacactacctgatttcaaactatactgtaagtccatagtcaccaaaacagcatggtactggtataaaaataggcacatagaccaatggaactaaatagagaacccagaaataaacccaaatacttacagccaactaatctttgacaaagcaaacaaaaacataaagttgggaaatgacacccttttcaacaaatggtgctgggataattgactagccacatttaggagagtgaaactggattgtcatctctcaccttatacaaaaatcaactcaagatagattaaggacttaaaccttagaactaaaactgtaaaaattctagaagataacattggaaaaccccttctagacattggcttaggcaaggagttcatgatcaagaacccaaaagaaaatataataaaaacaaagataaatagctgggacctaattaaatgaaagggcttttttgcacagcaacagtcagcagagtaaacagacaacccacagagtgggagaaagtctttgccatctatacatctgacaaaggactaatatccagaatctacaacgaactcaaacaaattagtaagaaaaaaacaatcccatcaaaaaatgggctacggacatgaatagacagttctcaaaagaagatatacaagtggccaataaacatatgaaaaaggccaggcatggtggctcatgcctgtaatcccagcacttcgggaggccaaggtggtcaggtcacctgaggtcaggagttggagaccagcctgaccgacatggagaaaccccatgtctactaaatatacacaattagccaggcatggtggtgcgtgcctgtaatcccagctactcgggaggctgaggcaggagaatcacttgaatccaggaggcggaggttgtggtgagccaagatcacgccattgcactccagcgtgggcaacaggagcgaaactccatctaaaaaaaaaaaagaaaaaatgctcaacatcactaatgttcagggaaatgcaaatcaaaaccacaatgcaataccaccttactcctgcaagaatggccataatcaaaaaatcaaaaaacagtggatgttggcttggatgcaggttacagggaacgcttctacactgctggtgggaatgtaaactagtacagccactatggaagacagtgtggagattccttaaagaactaaaagtagaactaccatttgatccagcagtcccattactggatatctacccagaggaaaagaagtcattattcaaaagagatacttgcacatgcatatttatagcagcacaattcacaattgcaaaatcatggaaccaacccaaatgcccatcaatcaacaagtggataaagaaactgtgagatagatagatagatagatagatagatagatagatagatagatagatagatatacatatatatataaaatacatatatatatacatacacacatatatatgacggaatactatgcagccataaaaaggaatgaattaacagcatttgtagtcacctggatgagactggagactgttattcttttttttttttgagatggagtcttgctgtttcgcccagtccagagtgcagtggtgcgatctcggctcactgcaagctccgcctcccgggttcacaccattttcctgcctcagcctcctgagtagctgggactacaggcgcccgccacagcgcccggctaattttttgtatttttagtagagacggggtttcaccgtgttaaccaggatggtctcgatctcctgaactcgtcatccacccgcctcggcctcccaaagtgctgggattacaggcgtgagccactgcgcccagcctggagactgttattctaagtgaagtaactcaggaatggaaaaccggacatcgtatgttctcactgatatgtgggagctaagctatgaggattcaaaggcataagaatgatacaatcgactttggggacttgggggaaagagtgggagggggtgagggacaaaagaccacaaatatggtggagtgtatactgcttgggtgatgggtgcagcaaattttcacaaatcaccacaaaagaacttactcatgtaaccaaataccacctgtaccccagtaacttatggactaaaataaaataaataaatgcattatcgtcctacctcccacatattaccttcagtcctacaatttgcttttccttttttctctgctgatatacaacttcgcttcctttggaacatatttcaaagtccagctcatcatggattcccccttaaagtgccacttcatcctctagccctagctcagatctgaagtatagcactgatggccagagtaattacgaatgataatattaactacttactgtatttgtatcatgtgccaagcactctgttatgtattttacatgtagtaaccctaatcttcacatcctgagaagtattattatccctaatttacaaatgaggaaactgaggctggagtgacatgttcaaggccacatgaacagctattatgtggcaaatccagggttcagactgtgacttatttggctgccaagcctgtgttctttctctcacaacaaatactgtggcactgcactggattgatagtgacttgctttgtaagtatctccccccacaaccactatcaccaaagaaaacgtatgtttctcttatatgtcctcaatatgcttgttgaattgagttgaacagcttaaagccagaaaacacatctcctatttttttaatatattccatccttgtgctcagcacataaggtaatcattaaatgttaatgactaagtgaaatggaataaaatcagtgttgtggtagccatttttaaactttaagagtttaaatgtgcagcccatagacagcaccacagctgggagtgccatattgccattaagccagaaggtggattcacgggatggaaacattgaaaacagacaccacaagaatggttaagtcagttttccaaaccactttctacaagtagctactcctttctcccccataataatttcacaatgattagcctgctaggtgagaaataccaggcaaaaacctgcatctcagcagagtttagggcaaccacttaagtattgggtcaaggtgggaggtgatggggacaacaggtagagtcattcccatctagctggtcaaaagtgcaagataaatgccatctagatatctattatgggttttatctttctagataaatgcctttattcttataattagcttgataaaatgccatctcacattccaacacatatggatatcaaaatgcatatttggggaggaatggtgtcttatgttaccaatttctgcttcctttgctttctttgctcatagcacaaaatttcaaacttttttgccaaaaccttactatgtagctttttaacttaattaaatatataggcaattactgacaccatctgtcttcatagaaaaagaacaagaagtgacacaaaagcctgggattctgaaggggatgtttagcaaacaaaatcttctagttccactatagtaatatttatttttaagagcccttctgtcattttaaattatttatgtttcttagaaataatgaatttgaattatacttggaaagtggtggctttggtatgattttttttaaaggaaatatcagataatccattgctttttcagtaaaacaaaaacttaaacacgtcgttgaacatctgttactagtacagtctaacacagcacttaaaatcctttaaaatccctgaaaacctttatcaagttacatgaatcttttgcataaatggaactgttttagcaatatgtatattcctttaaacatatattttgctttcttaaacataagattcattgtgtcccctattgttctgagcccttataaataaataaatgaaattgcttcttttcttaaagactttatcttcccctgtcatgttacattcctatcccaccccagagtacctacctcatgtctggtttttttgtttgtttttgagatggagtcttgctctgtcgccaggctggattgcagtggtgcaatctcagctcactgcaacctctgcctcctgggttcaagcaattcttctgcctcagcctcccaagtagctggggttgcaggtgtgtgccaccacaccaggctaatttttatatttttagtagagacagggtttcaccatgttggccaggctggtctcgaactcctgacctggtgatccatctgccgtggcctcccaaagtgctgggataacaggcgtgagccaccgcacctggcctgttttttaatctttgtagatgtctccacaaatgtcttaatatgtaaatgctattaaaccaacccactggagcttgatcaggtagtcaggaaccaatagaagtccaaataatgcaacaaaattcacctcccatacagaggacacaggtaggaaatataaagaagaacatggagtttccctatcattggcagttaccaccaaggaggacaactgtgttcccctgcagcttttccccagaattggagggaccgtgtttcaaatgccacgtggcagcaactaagttccgaagtcaaatagaagtgtgcaggacacaaggacatttctaaagaggctcaatagaaagacatttctcaaagaaatggcactgtgaaacttctattcatatgaaagacttatggcataccaaagaatatgttatcccagattttgagggaaagcaccaatgtatatattttatattttttattcacttgttaaagaaagaaatttgaagaaagtaatttcatgatgattttctacaaattgcctcaaagatcctgtatttaatgcttagcagataacaggtagagctaaaactaagaatttacacttatctgccatgactcaatagcattctagtgtattctcctgagaggaagctatacattaagaaatagtgcattgaattttagaagaggtaaaggagaaagagggggaaaagaggaagagaggaagaaaataccacccttaatgccatttctttcatttgctagaaaatgaacccagggacaaatggcatcaaagggggcctgtttgttaaaagcagcctctggggtggagctcagcagagcagaggcctaccatagcagcagagcctggacaggtcagccgggatgtagaacatttactcaggtggaactccagggtgcctttcagccagcagctactcaattgaaatttttcccagggccctaaagctccacccacgtttctggaaagtgccataggactttgattgatcacaggtgggaaccttgcctttttgcctatactgaaggactgtatttctttgtccttatacagctcctatacataggctctcaaagtgctttagagacaaataatgggaaaggtgagacagaaaggtgttaagtgacttgcccgaagtcccacggtaaatcacaagccttccctggcttcacagctctctggcaattgggggagcttcttgctgtggctgccagcatcacagtgccctctcacattctgccaagcatttgtttccctcgccaggctgagagcaatcaacagggtcaagcacagtagagaaaacctggccttttgggttaggcaaacctggatctttgtcctcgccctgccgctgagctgtggaacttggcacgttcttgggttctttgagcctcaattttcccttcataaaatgggagtatgaataccaaacccataaagttgttcggaggatgatatgagcaaataccacagtgccttgcacttaataggcccttaatctacatcagtgtcccttcctctttcctttcccaagtctccctccttgagtctgtcctacatggtagctgcaaggcagctttctaaagattgctgccatccaaaaggatgtcctattagcctgacagggtgctgaatctttcctacaaacacgagtctgtaggaaacagtggcaaagtcatggaatccagattcatctctcagataactgaatccaaaaggttcccttatgataagcatgtagtacctgggactcaaccctctaccatcaccaaattagtcaggatgtattggattactgggttaacttgatggggttgagggagtgtccccgtggagggcatagagcttgcagggagccccacaccatagaaggaggctagagtgcttggagtcccctggggtgagcaactggaggacaggagaaggtggaaacatctgggacaaagcttttctgagccaccggcccactacctgagcagccccttctcttctgggtttgaccatgtccagtccctctcagtccaggagctgatacaaagtaaaagcctgctgtggtgagtccaagcaacagcttgcgttttagaaagtggcactgtcctcagagctgagtctttatgctgatggagccagatttatgctaatatatattctttcttccagatcatgactgcttatggtggcccatatattaaccctcactgggcattaatttgctttcgtgtctgtagcaggtattttctacccatacatggcaaagctttttaaggtttagactaatacctataataaactcagaaggcggtttgggaggtggcttatcacaggctcccacacttagtcatcattcacacactcaactagattcaaacaagtgaccatatacattgtacaggtatccatcctaagtgactctgtgtgtgtgtgtgtgtgtgtgtgtaacagctttagtgagataccatataccataaaattcacactttttaaaattttattattatactttaagttttagggtacatgtgcacaacatgcaggtttgttacatatgtatacatgtgccatgttggtgtgctgcacccattaactcatcatttagcattaagtatatctcctaatgctatccctccccccgccccccaccccacaatagtccccgatgtgtaatgttccccttcctgtgtccatgtgttctcattgttcaattcccacctatgagtgagaacatgcagtgtttggttttttgtccttgcgatagtttgatgagaatgatggtttccagtttcatccatgtccctacaaaggacatgaactcatcattttttatggctgcatagtattccatggtgtatatgtgccacattttcttaatccagtctatcgttgttggacatttaggttggttccaagtctttgctattgtgagtagtgccgcaataaacatatgtgtgcatgtgtctttatagcagcatgatttataatcctttgggtatgatatacccaataatgggatggctgggtcaaatggtatttctagttgtagatccctgaggaatcgccacactgacttccacaatggttgaactagtttacagtcccaccaacagtgtaaaagtgttcctatttctccacatcctctccagcacctgttgtttcctgactaatgatcgccattctaactggtgtgagatggtatctcattgtggttttcatttgcatttctctgatggccagtgatgatgagcattttttcatgtgtgttttggctgcataaatgtcttcttttgagaagtgtctgttcatatccttcgcccactttttgatggggttgtttttttcttgtaaatttgtttgagttcattgtagattctggatattagccctttgtcagatgagtaggttgcaaaaattttctcccattctgtaggttgcctgttcactctgatggtagtttcttttgctgtgcagaagctcctgagtttaattagatcccatttgtcaattttggcttttgttgccattgcttttggggttttagacatgaggtccttgctcatgcctatgtcctgaatggtattgcctaggttttcttctagggtttttatggttttaggtctaacatttaagtctttaatccatcttgaattaatttttgtataaggtataaggaagggatccagtttcagctttctacatatggctagccagttttcccagcaccatttattaaatagggaatcctttccccattgcttgtttttgtcaggtttgtcatagatcagatagttgtagatatgcggcattatttctgagggttctgttctgttccattggtctatatctctgttttggtagcagtaccatgctgttttggttactgtagccttgtagtatagtttgaagtcaggtagcgtgatgcctccagcttcgttcttttggcttaggattgacttggccatgtgggctctttttgggttctatatgaactttaaagtagttttttccaattctgtgaagaaagtcattggtagcttgatggggatggcattgactctataaattaccttgggcagtatggccattttcatgatattgattcttcctacccatgagcatggaatgttcttccatttgtttgtatcctcttttatttcattgaacagtggtttgtagttctccttgaagaggtccttcacatcccttgtaagttggattcctaggtattttattctctttgaagcaattgtgaatgggagtttactcatgatttgcctctctgtttgtctgttattggtgtataagaatgcttctgatttttgcacattgattttgtaacctgagactttgctgaagttgcttatcagcttgagattttgggctgagatgaaggggttttctagatatacaatcatgtcatctacaaacagggacaatttgacttcctcttttcctaattgaataccctttatttccttctcctgcctgattgccctggccagaacttccaacactatgttgaataggagtggtgagagggggcatccctgtcttgtgcctgttttcaaagggaatgcttccagtttttgcccattcagtatgatattggctgtgggtttgtcacagatagctcttattattttgagatacgacccatcaatacctaatttattgagaatttttagcatgaaaggttgttgaattttgtcaaaggccttttctgcatctattgagataatcatgtggtttttgtctttggttctgtttatatgctggattgcatttattgatttgcgtatgttgaaccagccttgcatcccagggatgaagcccacttgatcatggtggataagctttttgatgtgctactggattcggtttgccagtattttattgaggatttttgcatcaatgttcatcaaggatattggtctaaaattctcttttttggttgtgtctctgccaggctttggtatcaggatgatgctggcctcataaaatgagttagggaggattccctctttttctattgattggaatagtttcagaaggaatggtaccagctcctctttgtaccgctggtagaattcggctgtgaatccatctggtcctggactttttttggttggtaagctattgattattgcctcaatttcagagcctgttattggtctattcagagattcagcttcttcctggtttagtcttgggaggatgtatgtgtcgaggaatttgtccatttcttctagattttctagtttatttgtgtagaggtgtttatagtattctctgatggtagtttgtatttctgtgggatcggtggtgatatcccctttatcattttttattgcgtccatttgattcttctctctcttcttctttattagtcttgctagcagtctatcaattttgttgatcttttcaaaaaaccagctcctggactcattgattttttgaagggtttcttgtgtctctatttccttcagttctgctctgctcttagttatttcttgccttctgctagcttttgaatgtgtttgctcttgcttttctagttcttttaattgtgatgttagggtgtcaattttagatctttcctgctttctcttgtgggcatttagtgctataaatttccctctacacactgctttgaatgtgtcccagagattctggtatgttgtgtctttgttctcgttggtttcaaagaacatctttatttctgccttcatttcattatttacccagtagtcattcaggagcaggttgttcagtttccatgtagttgagtggttttgagtgagtttcttaatcctgagttctagtttgattgcactgtggtctgagagacagtttgttataatttctgttattttacatttgctgaggagtgctttacttccaactgtgtggtcaattttggagtaggtgtggtgtggtgctgaaaagaatgtatattctgttgatttggggtggagagttctgtagatgtctattaggtctgcttggtgcagagctgagttcaattcctgggtgtccttgttaactttctgtctcgtcgatctgtctaatgttgacagtggggtgttaaagtctcccattattattgtgtgggagtctaagtctctttgtaggtcactaaggacttgctttatgcatctgggtgctcctgtattgggtgcatatatatttaggatagttagctcttcttgttgaattgatccctttaccattatgtaatggccttctttgtctctttagatctttgttggtttaaagtctgttttttcagagactaggattgcaacccctgcctttttttgttttccatctgcttggtagatcttcctccatccttttattttgagcctatgtgtgtgcctgcacgtgagatgggtttcctgaatacagcacactgatgggtcttgactctttatccaatttgccagtctgtgtcttttaattggagcatttagcccatttacatttaaagttaatattgttaggtgtgaattcaatcctgtcattatgatgttagctggttattttgctcattagttgatgcagtttcttcctggccttgatggtctttacgatttggcatgtttttgcagtggctggtactggttgttcctttccatgtttagtgcttccttcaggagctcttttagggctggcctggtggtgacagaatctctcagcatttgcttgtctgtaaaggattttatttctctttcacttatgaagcttagtttggctggatatgaaattctgggttgaaaattcttttctttaagaatgttgaatattggtccccactctcttctggcttgtagagtttctgccgagagatcagctgttagtctgatgggcttccctttgtgggtaacccgacctttctctctggctgcccttaacattttttccttcatttcaactttggtgaatctgacaattatgtgtcttggagttgctcttctcgaggagtatctttgtggcattctctgtatttcctgaatttgaatgttggcctgccttgctagattggggaagttctcctggataatatcctgaagagtgttttccaacttggttccattctccccatcactttcaggtacaccaatcagacgtagatttggtcttttcacatagtcccatattttttggaggctttgttcatttctttttattcttttttctctaaactcctcttctcgcttcatttcattcatttcatcttctatcactgataccctttcttccagttgatcacgtcggctaataaggcttctgcattcgtcacgtagctctcgtgccttggttttcagctccatcaggtcctttaaggacttctctgcattggttattctagttatccattcgtctaattttttttcaaagcttttaacttctttgccattggttcgaatttcctcctgtagctcagagtagtttgatcatctgaagccttcttctctcaactcgtcaaagtcattctccatccagctttgttccgttgctggtgaggagctgcgttcctttggaggaggagaggcgctctgctttttagagtttccagtttttctgctctgtttttttcccatctttgtggttttatctacctttggtctttgatgatggtgacgtacagatgggtttttggtgtagatgtcctttctgtttgttagttttccttctaacagacaggaacctcagctgcaagtctgttggagtttgctagaagtccactccagacactgtttgcctgggtatcagcagcggtggctgcagaacagtggattttggtgaaccgcaaatgctgctgcctgatcattcctctgcaagttttgtctcagaggagtacccggccatgtaaggtgtcagtccgcccctactggggggtgcctcccagttaggctactcaggggtcagggacccacttgaggaggcagtctgcccgttctcagatctcaagctgcatgctgggagaaccactactcttcaaagctgtcagagagggacatttaagtctgcagaggttactgctgtctttttgtttgtctgtgccctgcccccagaggtggcgcctacagaggcaggcaggcctccttgagctgtgatgggctccacccagttcaagcttcccggccgctttgtttacgtaatcaaacaactaactcggcaatggcgggcacccctcccccagcctcgctgccgccttgcagttcgatctgggactgctgtgctagcaatgagcaagactccttgggtgtaggaccctctgagccatgtgagggatataatctcctggtgtgctgttttttaagcccgttggaaaagcgcagtattagggtgggagtgacccgattttccaggtgccatctgtcactcctttctttgactaggaaagggaattccctgaccccttgcgcttcccaggtggggcgatgccttgccctgctttggctcatgcatggtgtgctgcacccaccatcctgcgcctactgtctggcactccccagtgagatgaacccggtacctcagttggaaatgcagaaatcacccgtcttctgcgtcgctcacgctgggagctgtagaccggagctgttcgtattcggccatcttggctctggtcttgatctcttgaccttgtgatccgcccgcctcggcctcccaaagtattcaaaattcacacttttaaaatatacattacaatggtttttagtatattcacagagttgtgcaaccatcaccattatctaattttacaacattttcctcaaccccaaaaaagaatgctgtacacattagaagtcactccccatacctccttcctcacagccactggaaaacattttccatctccatggatttccctattctaggcattttatataaatgagatcatacaataggtgggcttttgtgactggtttctttcagtttctataatgttttcaaggttccatcatgttgtagcatatatcaatgctttgttccttttcatggcttaataatatcccattgtacggctataccacattttgttaatttattcatcagtgaatgggtatttgggttgtgtccactttttgactgttatgaataatgttgcaatggacattcatataaaagtgttcgcataaacatgtgttttcatttgtcttggttatatacctaagagcagaactgatgggtcaaatggtaactcaaagtttaacttttttaggaactgtcaaagtgttttccaaagcagctgtaccattttgccacctcactagcagtatataagggtcccaatttctccatatctttgccaacacttgttattggttttttatttcaaccatccttgtgggtgtgaaggagcatctcttatctgtgttttcaaggaagatttttttccccttgtgttattttattgaatcacccagcaaagattgattgggcactactaatatcaggagtgctgtgctgagtgttgtacaggatgtaggtatgaaaaagagaggttcttgctctcagtctcattctcctctctaggaatttcccaaaagtaaacaaacttgccttgaatttgaaatcaagggctctgaactctggtctgaactctactcctgaccaagtctcttccccttgtgagccgcatgcctggggtttgaggggactggactagaccaactctaaggccatagctcagacagtccatatttcttgcctatatattctgcaaccaaggttgttctttatttaaaaattctggtttcctggaaatgtcaaagaaactgggaaggaaaggggaactctgcagccaactcactgcactgattagggccaatgccacatgctcatccttaccgagagaggattttgctttgcacgatggtcatcaaaggctgttcataggaatcttccccaatgggatccacagaacaagagctcttctgctttgaaaatcctcacagaagacttttggagatcatttgaagtgacagtaaaggagcacttctcaactaagagaatccttcaccagccctgccatttatagcatggaaattaaagagggagaataactatctacagtatgggattactatattgaattgccgtggaaggcgcatatacaattactagtcctagaaacctgaaatagcttataaaaattgtgttttcatgtttattataaattagtgcttaatgtcaaaataaaaaagtagcattccaaaaattcataagaaaaaagcaaagaaatgcttaaaaagaaatgagtatattctgtatctttataaataatagttgggccattggtcttgaaagtaatagagggagggtcataaatgcatggaggctgcagaagaaactcagaaaaggaagcagagaaagcaagagtatattaaaagatttgtgatttttttttacaaaggtgaaaagtataaatacagctgccgatgatgaaagtttaagtttcaagattttccatttttgatcctcaaattaattttagatatagtttctgcatatcatgaacgaatttccaaagtcacagagaaacttggcactctgaagaaattgatctactaatgctggcaatgaagtgtcatagaaagaactagcctggaagtcaggaacttgggctttgattctagttcctcccctaaatgtgggacctgagaagtcatttcaccctcagagtcctcacccataaaatgaagagatgagaaggatggaggtcattctcagtcagccaggacagtgctggttaagacctccctaagccctgagtatttttagttttagagattccatcctacatcgtatcaaatgtattaaaaatccatttcatctattccatgaggataatcatggaatatgatttagacataactgtattagtattgtgttgtatctgaccgacatgttctatttggttgatatttttaaaacattgttattttgctgttttcttttcatatttgggagccaggaactcccaaatatggattttggatttttttcagaatccaaaagttttgaaggcctttgaaaatcacggaagtcttaggtacgcctggccctgagtgctaagtggtggggcacagatggtttgcagcctcttaccccacccactccaaacaccccatagaaggcagtgtccaaggggattggtacagagatggaagctctagttgctcaaagatagcttcgtggagctgtgatttaagtcatgcccaaaaagatgagtaggattaacagagacagaggggaaggcctctaagctgaaaaccaagaggctcaattgctgaccggggtgactgccctgtacagcgacaactgccgttcttcacttctccaagagactgggctatcccaacagctgccaccaggtggcaacaagccaagcggctgctctcccctctgcctattgatttaggcagagggcctattgcattttaatgttatgcaaacaactcttaccaaataccataatcacattagtattttactaattgaaaattcttacagtggggtgtaccaactcctttaaaattaagcatgaggtgtgttgtttaccacaatggagagctccatgctgtctggagattcagtgatccaagtggggaaaaaatatgtcatttagtaactgcctaagaaaacgtgttctgtttataatagctgggattctgaggcctgtatttaaatagcatctgcaaagagttaaatgtgctccctgtctctgagaagcaggcaagaacacagaagtcaagaaccaagtgaattcttacacctgctcaaactctgctcccaacagtcagatggggaagaagtggtcaggacccaaaacagatttatgtctgccaggcctctgtagtaatagtctcacacactatctcatttagccactgaatccacacatatccctcagggatagatcccatcaggcctatattaatagacaaggaaataggcccagagaggggaaagaagttgcttaagaccacaaggccagcactcccagcgaggtcctgtgactctggtccagggcactctctgtcctgagaaagccatccacctctcccaagccacggtcccctccaatcccattactctcaagctgttgtcacttttcccctaccaagctgcccctgtccttctccaccttactgcatcttagcctaaacgtgatgagaagtggactgagctgcctctgccttgtcccctggggaaggcctcaggtcctatagacctcacttctcaccaatccaggagaatcttgagccccaggcccagaagtgagagcagagaaaaagcttcttccctcccaggaactgattctgttttatccctagagcctagccatgcacatcctcctgattttacagctgcaaaaggagaaaaagtgcctgagatttcaacccaccctctataacatgctgtaacaaaggcatctcaaacttaactgatctgaaatcttgattttaccctccaaggtatttctctggcattctgccccagtgggaaatggtaatgctattcttccattttcttcagggtggaagttttggagacacctttggctcctttttctcatactgcacatccaatccatcaataagtccttttagttctacttttgaaaaatatctataatacaaccacttctcccaccttccagttaccagtgtggtccagccaccatcatctctcacctcaattactgcaagtcttcctaactggactccctgtttccatccttgccccctcagggcctcttgtcaatgcaattagagtcacattagttagctcacatcactcctccactcaacactctccagtgcattcccagcctccacagctgtaaaaaggaaataagcccttggctctgtacctagccaaaccagtaaaacagagggaaccatggcctacccatggctgtattctctaccaaccagaggagctgggcaggtgaccgagcacttggtcttactctagaaaaaatcaagtggtccaatgctggattttctgtcgaactggggctgtgaatgctgtgaacatgggcagagaggtgactcacacatccctttggccaaccagctactgagcatgatgggccgtgtatcacagttcaccctgaaggctggatgccatttctggcgtgggtgaattctcagtactgcatgtctcagagttggcttatttggagtgcctgtctttttaaaaattttcggcaatatgataaatatacacaattccctgttagcctcatagatacatctggaggcaacagagggaggattcacccagactactatccccagtgagtgattagttaaggaaagtgtggcccggagaggcaacttcttttgggtcacagatatttgtctcagaccctgataccaaaagctggggcctttagtgggtcatttatcctgtctgaaatctctggttcttcttacaaaaagaaaaagaggaagaagacgataagaaaacttagagatgagtctgcagagcatctttggattcataaagctctgaaatcctgattcttcagtgagtgttatttgatctataaattagtctctgagtcccatacgtgccctgatgcccataggagaagggtggcaagaggcaacactaaaccctttgctgagaactttatttgcacagaatgtagggcctgagcacatctgcccacatctgcgtgctctgccacccattcatcccgcctgtcaccagaaagaggcagaagcagcaggggtgagcaggcagcctccatctgctgagaacacctcaggcaaaaagggctcaagaccaggcttctctcccacccctccccacacagaagcatgttgctacattgtcatctcaaagcttgcggtccagatccttggaccagaacaatctgggcaagctgacctttgcctgactcctgccctgtctgctggctctcacctgcccaaggcctccagatgcagctgtggttcacacggcatccagcacagtagcagtcagggcagtggagagcaggggcctctgtagcacttctgccctctccaccccactggccctgctcctttgcaggctacaatgcacttctttacaaccaatccaatagaaatagaattcagccaggcatagtagctcaggtctgcaatcccaacacttttggaggccaaggcgagagtatcatttgaacgcaggagtttgagaccagcctgggcaacaagatcttgtctctacaaaaaaggaaagaaaaaaaaattagcagggtttggtggtgcaaacctattagtcctagctactcaggaggctgaggcaggaggatcgcttgagcccaggaagtcaaggcagcagtggttttattattatcttattattaatactttcttattaatgagatactttgcattcttttttacatcctcagtcctcaaaatctggtgtgcatttgtaccatttcaagtgctcaatagccacatgaggctagtggctaccatatttgatagtgcagatctagaatatacatggaagtctatatacagttgcagttatcgtgattctgctaatgttaacactggctggtaacattttgttatattctcatctagtcttttctacatatattagttttgcaaagctgaagtcatgttgcttgtgtaactttctatcctccttttgctgttttgtgcatcttcctaaatcatcaaaagttcctcacaaccactgtctctaattatatcagactatcccatcacttggatgtgtcatagtctttttagccactgccaaaacgttggacagcaagtgtttcagtaatataggtaatactgagataattattttttgtattccttgtgctcttaagaccttaatataaatctctctagcattctaaccatttttaacaaagtgacctttaatcagtcaaacaactggcaacaagtgatttctgactgacagctgagacaccttatgttctcattactcacctctgacacctggttctgcaacctagggcaaccacttcacttttcacaccacagtcgctccatttataaactgactgtattaggtgatttttaagggtctttccagccctaaccttcagtgatatttttcccccaccctcacatctaatcaattaacctgtcaagccagttattataagtcatcataagtcatgtcaaagccaccacataaacattttaaattcatccaagtctcccatgcccactcatagtactttgttcaggcccccatcattgctcacctaaagtgggacaagagtacctagtgctgagagattagattctaaagttaccatcagagtcccaaatcaagaataggattaaatgggctgggctcagtgctcatgcctgtaatcccagcactttgggaggtcgaggtgggtggatcacttgaggtcaggagttggagaccagtctggccaacatgttgaaaccccgtccctactaaaaatacaagaataggattaaatgagaggtgtgagaacacatgggcctggcacggaggaggtgctcagtgaatatttgctgcatttgaatctgaaaccagcctcaagtgacccacctggatctcatttcctaaaagttacggaagaggagttcacagtgaaacactggaattgcgaatgcaccctgctgcgtgccctgccccagacacgaggtgctgcaggaagacaaagacttggcagcatcccctaaagggctgacagtctagagggggagataggaacccctgtgcacaaaacaagcatgcctcaggcggtgtcttcaatggaaagaccagatggagaacagaacaattatctgagcaaatcaggcaagcctgctgttgaggaaaaggctgaagaaaatttgtcctcctgtctcctttgagaaccaaggggttagggcagccagaggaagcaaaagcatttcagctctagaaacagagttctggtttgtactatatgatcttaggcaaactatgaggctgcttttttatctcagtgtcttcatccgtaaaatggagacagagtaataccaaccttgcacaaacctacctgcctactggattgagttgtgaggttgaatagaacaattacgtatggggacaacagttattaaatgggtgacctaatagctaacatagacaacggacaatgtgccttctaagaatctgctctgaaaggaaatgtttagtcatcataaaaagcatctgtaatgaactttatttgtttaattttatttatttccctatttttattaaatagagttggggtctcgttatgttgcccaggatcgtcttgaactcctggcctcaagtggcttcctgccttggcctcccaaagtgctgaagttacaggcatgagccactgcgcccggcctaccttataaagttcagtaaaggttgggcgcggtggctcatgtctgtaatttcagcactttgggaggccgagagtggatcacaaggtcaggagttccagaccagcctggccaagacggtgaaaccccgtctctactaaaaatacaaaaaaattagctgggcgtggtggcaggcacctataatcccagctactccggaggctgaggcagagaattgcttgaacccgggaggcagaggttgcagtgagccaagttcgcaccactgcactccagcctgggcgacagagtgagactccatctcaaaaaaaaaaaaaagaaagaaattataaggcaatttcacgtgcatttattttgtttctaaaaccctgtcagtattatcatttgctccttttacacttaaggatactgagattttgctccttttacacttaaggatactgagattgagaaagcttaaccaacccattgcagttcccactgtgaggtccagatttaagctctctgactccgtggttctcactctttcccctacactgtgctgcctcctattaaaatccttattaccaaagcattaatattattaacataaatattaataatgtttgttatgtatgtttccctttgatcaaggacactaaaacctcaaaatagaaactctgaaaaaaaaaagtctgacctgctagaatagcaagctcactttctcatattaagggaaagtagctgtccccatctgatttacatttcatgccatacagcaggaaatatttaagttgacaaataggatatttacaactgcaacagatacttggcagttagtttttaacaattgttgcaatgtgatttatttgctattataaaagggcattactgtgcgaatatgactcctgaaattagctttagtttagcaaggggccttgacagcttgacctcttaatatccttataatgacgccatttacattcaatgcttactcaagtcactcactgctagatttgtttgacaggagtccactctagggcagatgtattatgtattttaacacacagagttggtgagcggggtaaatacaggccttctaggaggaaaaactgtttaatcaagtcttcatgaaaatgtgttagtttccaacttcctacagtgaaaatgcattatgctaattacagcatactccagaaatacttcatgttttctccacaagacattttcatggcatgtcttatattaaacacaaacatgttctgatcctctgcaactttagtttttaatttcactggagaactgttacataggataaggattggctgggccagaatcagggaatgggaagaaggtagacttggagccaggtagaattggattcagatcccaacaccaccacttcctaactcagtggatttgggtacctccctgaacctcagtttcttcatctgtgacatggggttgttattttttaggctgccacagagatctgagatatttatgattcacccagcttcataaaaactgcaggtacttgatacatgggaccagttgtgtttttgttgcttgtttaaagctcaaaggtcaccttcatgatgcagccctgatttcattagacaaacccagtctgtcctttctttctgcttcagtagtactttgttccaccccattattttatcacatataaaattctattgtttaattggatatgtatgtatctgtcttcaccttcttatttttattttttatttttttgagacagagtctcactctgccacccaggctggactgtagtggtctgatctcggctcactgaaacctctgcctcctgggttcaagcgattctcgtgcctcagcctcccaagtatctgagattacaggcgcacgccaccttgcccagctaacttttgtatttttagtagagatgacatttcgccatgttggccaggctggtctcaggtgatcctcccacctcggcctcccaaagtgctgggattacaggtataagccaccgtgcccagcctgtcttcaccttcttgatggcagggcctatgcctatttacctttgactctccagtgactaggacgatgatatgccttgaacattgaactgaggaggatgccaggggtgcttctggattcagtgtggggatgggggatgacaagggcaattaaggttgatctgccacaggagagggaagaagtaacacatgacctacttttatcattgccagtttagcacatagtagatgctcagtaaatatttgtcaaacgaattagtggacattactcagttacctagcagttgacattaacttataaccaatgtctattttttaaagcatttttatttttatttttattgcatcataatattcttctaataacactgtgatacagctaggataaggtgttatcaccaattgacaattgagaatactgtgacattgtaggattggtaaaataagattacccttcactctcatgagaaaatgggggtagacctaagacttagaggccaaccattagtttcccttaaatatcatattgaggctcccagaggggctgtcactgctttttccaaaatcagggcaaactgccctttctcatattcatcactcttttcccgtctttctgctctactgtagttccccaccctccaaagcttcagtctcattttctcagtagaaaacctggcactgaccacctgcactgacctgcaggccataggcagaaaaatcaaagtcaacatgagctttgcaagactcggcatctctgtcagattgtcttggccaagtatttctgtaacttcccacaagaaccttgaatcttctgattagaatcagactccatctctcagttgaacaatgtacaaacagaaggaaaaacatctactccattaagacacatggtcactggtttcacttagtctgatgtagtttggtctggttaggcagaggtggggccttcgctgctgtttgctgatttcaccctcacttctacggctcctgttttaatcaggtgtgggcaaccggccttaacctcgcatatagtgaccagctggccctgactcaactcaccttatacctgacaaacggccatctggattgcagtttgagcaccctggaagtgccccgctttgttccaaaggaaaggaagaaaaccaaatgcatgagtgcgctgtcaatgccggtaagcaagaggtgcttcctgaaggttctcggtgttcagcaacacccactgccactgcctgagctctgtctaggagccaggatctttgagtacaggaagaagaaagagcctaaggcaagtcattggacctgtctgagcagggtctggaaatgcgaatgtgttggtcagaggaaagggagaagccattcccgaatgaacctgccatctgtggaaatgcgaaagagcatggggctctcctcccctttttctaggcaggtacacctacacccattgcctcaactacaagctgtttcacacaaaacccatatttttctagccccactctcttttgtgagcttcagattcatgggtccaaaattctatagaacatctctgcttcgaatcctcagagtcaagctatccaaaactgcatcacatttgtctttcttcctcctgtacttcctgttagtggatcaggccagaggctgataagataacccccagccccacatccagtcagcaagcagggcgtgttgagtctagctacgaaaatgccactaacctgacccctcctctctctccacaaagatagtgtcttagtgtcggcttccgccatctcacacctgtattcctcctaagattccctgtccctgcctgtgccctcagcctaaacagacacggcagccaaggtggcaaggtgaaaagccagtctgagcatgttgttcccctgtgtgtgattttgaatggactcctgtgatcttcaggaaaatcccatttcccagcttggttaaggagccccatcatgttccacctcttcccacagctgccgcctcctcccttcttattgctagctccatcagtgagggggctggggccagagtcctggggctggctgcgggttaccaacctcagcaccctgagtaacaaagggcatagccccatggggacagtgggtgcttgattgagtaggctaggttggtcatggagagagagaacaaaggccaaggggaccagatgccctttgtgcaagagtgtattggggactctctggccacggtgctctcacagctgccagagggtttctttggcctttccttacaacagtgggcttcatacttttttgcaaatgaagctctacttgaaatccaaatatatcaaacagataaaagaggaactctagtgattaatgggacccaacatgagtgtcccagagataccttttccaagcggtctcctgcctctctgtgaacccctttgggtccagtctggatttgaataacctttgactcttcccaggatctctgcagtcaccataaggagggcacctgatgtcttggggggctcaggcagctttttcctttccctcttcttcatccagttgcccaatcaggtaccaggaagaaccttgctcacaagaatccccttgatctctttccttagtaagaagagaagcagagttgagctggagaggagaaacagacctcttttaattatgacccaggaccttgctaagaggctttcaggtccatctccacctgtggcctccatcctcaccaaagagacctgagagaccctatgttcagtgctagagggagaaacagcagtgacacttgagcccttctggccagtgaacctaagtctatgccatttctgcaagaagctgggggtcaggtgtggtggctcacgcctgtaatcccagcactttgggaggccgaggcgggcagatcatttgagcctaggagttctagaccagcctaggcaacatggcaaaaccctgtctctacaaaaatacaaaaattagccgggcatggtggtgcatgcctataatcctagctactgggaaggctgaggcaggaggatcacttgagccctggaggtcgaggctgcagtgagtcatgatcgcgccattgtactccagcctagttgacagagtgagactctgtctcaaaaaataaaaataaaaataaagctggaagcagagtggtattcagcacaagacttccaaagacaattgcagctttgaagtatgttgcttcagaaggctatcagcagaagttgtgctttgagtgagaagcactcttccattttccccatgttgcctataggtttcattcctagctataggcaacattctcctgtgatcaagtcttaaacatttttaggaagtgcatgcacacaaaagggaggcattatgatcttcaataaggccaatacctcttaaatcactagagaaaagctatgcaggttttctggtgtaggaataaattgaaagggcttttcattttagaaagatacagatgttcccacccttgtgccactatgcttgggttgtgcacacaccctcctgtgcatgtgtacacatatgatcagcgatttttttaaaaagaagcatgtgcacatgcacacgcggtacaactcacaagcaaatcgaagcttcctgaacaagtgtgaacagactatgatgccgtcaagtttatgatcaggcagttgacagccccctttgaagactgaaggagaagaaaatgcacagatgaaaccacaatgataatgagagcgcattcaaaactaatgcctataaaatgcttccagtgtgggcccttttctttaataatatgctatatagaaggaaagcaaacaccttcctgggctctcagaagagctgttgtctcatctcagaaacaggtgggagaactgtcactcagacccatttagaccaggtgaatgggtttctgattcactgacctccacaaagaaccacttgaaggtgtaaacaaggcctgataaatcccagacgtgcgtgttttagaaatgaaaaggaatcgcctaacagtgttttaactttcaattaatgttctgtccaaaccggcatcaatcattacccttttctgtcagtttttcactcttcctcgctctttctggaccctccataccatggttggtgagtgtccaaaagggaacatctttgcaaacatcttaacacaacccaagtcatttatacacattttagcagcacatgatctgtaatgaatgattaagtaaaaccttttgtgttaaattatgatgttaataatgattctgtctcctgtaatttattataaattctcaaatgcttcgggtttgattttgatagaatgcaacaacagcagagtttatgtgatgactttatttttagaactccttctttgaaggcacacatttccctgctactgctgctactgtaattatgtacaaaaccaatcactcattagagttaggatacattatcttctagacagatgaggctaaataagcaacacattaataattcagagagcagttcattatgcatgtggatgcctgcttcgtaactgaaataagaacctcatcagcctctgccaacccttaaacaatagttctgtgttattgcagccacattcaagtttacgcttgttaaactgctacttggattattttatcaaacattcatttatttgtggtcccttactgccgagaacagattttggaagctccttttttaagttaatgatttgagcaatgggtgttattaattctcagaatattataaacatgattaattttcaggcagagatttattacataaggatttcaactatgtcaactgaaatgcatcactgtcaaaacaagtatcatggcgaaaatacaatatgttccacacttcaagtgctggagctcagaactaaatcaatttaaattgtggctgaagcaaaattatattatccagtgaaaaggagtattttgagcttcctttatttagcttgaagcattcttgttaaattgtgatttagaaaggtagtttaataagactagacttctaccaagaatattttgtcttttttttttctcctgttttactagaaaaggctaacctctgaaattcccacctattccaaatgtggtcactggacatttggagtgaagagtactggtctgggagttagggatcatgagttctgatcttctcttctggcctcagtttcctcatttctaaaataaaggagggctacatgatccccagggtcacttgggggatttgatcttacggggcctacagaaagggactctgcaccaagcctggcccaggcagcctcatgtgttgcggatggctgaaggaagggacatctcctgtacggggacacaggaagggcccatccctctatactacagccttcgcttaaaaggtctttttcttgcaggatcttttagaaaggagtaatattgtgacaggtcatatcctaagttctcatcagcctttaccttaaccatcagttactactttcagcaagaatcaactagaagtaaattctgcagatacttacccaatgcctattttgtgccaggcactctactaagcacagaggatataagggtgagtagcaaagccctccagtttaccaaaggacacagagcctttactccaccccgagtactttactaagtgctttccatgaatctttttgcagtccaatatattaggcaggtgctgttattatgcccatttttagataggaagacaaggttaagagatgttaagcaatttgttaaaggtcagtaggcaagcaagtagggaagccaagatttaacctcggcctgtgtttaactgtgacacattccaacctgccttgcatcagctgagaatcagtgatccagccccagagtggagcttgtgctcatccctaaagaagtcccttgttgaggccatagagaaagctcttctttgaaaagaggatgtacttccctgtgtgacgaggttgtctccaggaatattgccattatccattggcttctcgtctgctctgagctcagcctcagcttctgagtctcacacagaagcactaaatggaccggatgttcatagaggagtcttagggtttttttgtttgtttgtttgttttgagacggagtctcgctctgtcgcccaggctggagtgcagtggcacgatcttggctcactgcaagttccgcctcacaggttcacgcccaggttcatactcctgcctcagcctcccgagtagctgggactacaggcgcccgcgaccatgcctggctaatttttttgtatttttagtagagacggggtttcaccatgttgaccaggatggtctcgatctcctgacctcatgatccgcccccatcagcctcccaaagtgctgggattacaggcgtgagccactgcgcctggctggagtcttagattttaaaaagaacatgtaactggacatggtttcctatacatagcacagatttccaagcaaataacacggcatggaaaagagcatgtcacttatactatgaaccatctagaaaagcttgactatgttttttaaaaaataaacagttcacacactaaaaatatgcatgaaatatacatcttcaactcttgtcttcaaaatcaagtttaatggggttctcatttaattctttgaaatacataatatattcacatggttcaaaaggcaaaaggtggaaacagtcacacatggacaaacctcctttccattgatcagttcccacctcatcctacaaaggtaaccaccattctgtgtctatatatcctttcagagcatctttttacatatacaagtaaatacacatacaggtgatccttttcccccttttatacccaaaatgtagcctataatacatattgttctgaatctcacttttttctttggagagctttctctaacacttcattaaaaatgttctcatttcttttttttcagattcagacacctgagcagtatcatttcttttttacagcaacatgttatttcattgcatggatgtgccataatttatgtacccttcccccatcggtagatttttgggttgttttcagttttttcatattacagtgctgcaatgaataactttgtgtatatatcatttggcacatttaaggtatatcttagaatacataccataaagtggaattttggctcaaaggacataaccataaaaattaaaatttttaatttcaatagatatttccaaatcattcttttttgatccttatcaaacctacataaattgtacagcatcagaagagactagtttttacaagtcaaccttttaatagaaaataatgttttctatttgtataatgctttatactttaactatacatgagcttatttgatccccatgataaccccaagaaatcgatgttaaggattattatatacattttacagaataggaaactgaggctaagcaaagttaagtgagctgcccaagtcataaaggtggtacatagcaaagcccaggtcttctgattcaagtcaccttctgatgaaaaggtttattggttagttggtcagttttaatttgaaataattgaccttatctttgaaactatttagtttaatacgtgaaaataattgctaacatttattgagagcttactgtgtgccagacactattccaaggtctttacattctcatctaatcctcctctcaatactcctatgctattcacttgtgctatcaggctggacataagacaatcctaggtgattgatagtttcttcctgtagaaactgtgcagttggctaggtcttctaaaaagtagttgtatcttgtaagtattattctaatgcatttatttagcacttaatatgtgccaggactttcaccaagcatcaggagacaaagataattgacaaagtccctatccttgaggagctgaaaagaaaggccatagagagagagagatgttgctattaaaatagataacatacacatggataaatgccatttgagtgacagaccctcagcttgctgccagagttctcaggggaaatgaccatggactgacagggacagggaacactttaatgaaaacacagaactttatcctgccttaaagactagaacagtcactaactggcgaggaggggaggacgtcccctagcagatgggacagagtccaaagaaacctgtggtctgctaggaaaaggcagtgaaccagtcagactggagcacagaactggggaagtgggaagcaggagaagtagttggaagggtgcactgagcaagtttggggaggtctacccaccacaccagggtctagatttcaccgtgaaggcaaaaaggcctgaatatttctgaataggaggatgacacagaccaacctgtgttagggggaaatgattaatccggtgatactgttcagaatcccaggagatgggggaagagtaggggaaaaaacagcctgggaagttacatttattgtagatccaaaatcctttcaaaggaatgacaacaaaaatagtagctaccatttatcaggttccaggcactgcagtaggtgcttatttaatcatcagaagacagaatttcaatgatctgttcaagatcacatacacagtaagtggccttgtcaggttctgaacttctttctcactccatataacctttctactgcagaattctgcttgtatcctcacctctgactctccaggcaataaaggtctggactaggatggtgatggttatggaaaagaaggttgggagacatgtaccaaatatcctggctcttccttcagattctttatgcatcacaaaccccagtctgggaggaaggggagttgcactctgcatctgtagtgaagaagaaacctcagggtagcctgcccttacatgttgtctagtaatcatgtactactggacagtaagctcttctgctgtgctttggagccaagatacatagtattgctagattgtgctaccacatgcctgcctgcctacctctcttgctggctggggtctggtcttggtttttcttgtttatatactatggcagcatcagacaagtttagaagacaaaaataaccttggaattatcttgtgaattcatggcaattaccatgcaattacatgctcagtaaccacaatggaatttgagagtgtttacagttcacttccatgtgcaaaagcccatgcttctgggcttttcagtgtgaaggtgagagcatggccagcccagtatggcagggcgagcaggccttgtggccatgcccttccagacagactagctagctgggccagaacttctccaagccagttctttttaccccaccaattattcctgcttagtccaccagagccatgctgtcctccagcaggcaaggcccggagcaactgccctgagttgtccttctctaaggatggtgtgactgtcccctgtgccatgtaataatcacctgcttttgctccaaagcatttatcaatgggcagtgtctttcttaaattacatactttgaagagtctcttaagtcagagggaagagctatccacctaatctatttcatgtattcattctcttttatttaataaacaccaagtgcctgttctgtgctggtatcatgcccaaactggagattcagaaaccaaacagcgcctgccctcagaaaactcccagtcatggagggcagatgaccaagggaacaactcatgataggtcagggtgacagagtacagtagtgaggcatatgaggatcaaatcaattttctgttgttagaaaaatcccaatggctacaaatgggacgctacaagtggggtaaacaactcaagatgtattagcctgtgggggcctaactcgtctgtagatgtggactccacttgcatttaggatgagcagccttaactggtggcactgatgatgtgaccttcggacacaggacttgatgtaaatgttgaagaaaaacatgctccccccatcatgtgtgaggggagcatgtcaccaaaagtgccacgaaatctgagtgtgtgtgtgtgtgtgtgtgtgtgtgtgtgtgtgtgtggagagggagagagggatgcaggagaggaaaggaggtctattctctgcagagcactcagtcagccccagttcccttgcgttatctcagagacaggaggcgagccagaggcctgattataatgcatgtcaggtcactacgattccttacggccagctccagaccagcagcacctcctttgcctactccttttccaggtcactgcataagtctgggtacctagttgcccagcacctgtgcgtcaccacagttcaagagccaagccaggcacctttatcttctatgccctaaggttggccatggccctatatgcagttctccaaatttccagctatctagagaaaaacagctgattgactaaggcaaatatcacatctcaaaaagaacatgctataaaactgccaggatccagttctttatctggtacatattaaattttaaatgttttcaggaaatacataatgacagcactttgggcctactatcaccaatctctttggcatggctttcactgatagacaagcaagataaagaagagccgtttccccaaagaaagcagcatcaaatttctaatgttggccacctcaaggaggtggtccatgcccagtgacttgctgccaaaggttaaagtatgggaagagtgggaaaatatctttacagcagagaaatctgtaaagttttttcacaagcttcaaaagccactgtagccaggtgataaaggttaacatcatcagtgataagtcacactgataccatctatctacccttgatatgaagtgaggaaaatggcagtttgcccacgtggtcttcctctcaaaaacacattactacagtctaatcaggagaaaaacatcagacaaactgaaattgagagagatttcacaaaatgcttgcccattactcctcggaactgttaagatcatcaaaccacagggaaagtctgtgaagccgtcacaggccagagaagcctaaggagatatgacagctagttacggtgcagtgtctcagatggggtcctgaaacagaaaaaaggaattagggaaaaactaatgaaatagaaataaagtatggatttatgttaatagtaatgtagggccaggtgtggtggctcacgccggtaattccagcattttgggaggccgaggctggcagatcgcttgagctaggagttcaagaccagcctgggcaacatagtgagacccctgtctctacaaaaaaataataaagttaaccaggtgtggtggcatgcacctgtagtcccagctacttgggaggctgaagcaggaggatcacttaagcccaggaggcagaggttgcagtgagcccagattgtgccactgcactccagcctgggtgacaaagtgagaccctgtctcaaaaaataaaataaaaataaaaagtaatgtagcaatttgttcccttagttgtgacaaatgtaccacagcaatgtaagatgttaacaataggagaactgggtgtgggggatataggaactctcagaattatcttcgcaattttcctgttaatctcaagtattccaaaattacaagtttatttaaatatctgtttaatattcagttgtgctcctttccagatgctggcaaccagtcgctatgcagtgatgaccacccagctaagacacagcaatctctcactggttttccactatgtttttctccagatctgtagggcccatggcattggctatgatcttgaggtatgaagggttacagttggccaggggcggccaaagacatgcctgtgggtgatctaggtagctaataatttggtgccccttcagatagatattctttaaataccggtttgacgtgtctgtagaggaaggctgattgctgcttggggaagagcagatacgcaactccacagaaagtagcacatagtcctggaaagttctacttcgtctccaatcttacacacccactttgctaaagcagaagccatgcaagctctccagacttaggaggcattttggggaccacctcatgatcctgaagcaggccctgagcttcctgatcccacccaaagctgcttatcaatgaatagcttctgtcttagtctgctggggctgccataacaatatagcacaagctaaatggcttgagccacagaagcgtattttctcactgtctggcagctggtacatccaaggacaaggcactagcagatttggttcctggtgagggcctgcttcctggcttgtaaatggctgcctccttgcggtgtcctcacatatggaaggagagagagagagatctctgttgtctcttttacaaggtaccagttccgtcaatcaaagcatcacacctacagcctcatttaaccttaatcacttccttagaggccctagctccaatacagtcacttggaaggtcaggacacaattcagtccatagcatcctcctactgatatttgataatttatttctgaagggagttctgataaaaaccattttctctacttttggtctatttccaatgataccgggggcccctgcatagctgctttatcctgatgtagctgactagaggcaagtgcaatgcaacgtctcctgccaaaaatagaacctctgttttatgcctagagactcatgttactccagaaaaatagtttcatgtttttctactttgattcagattttcaagtctctcacacgcagggccattctaagaccctgagtaaccctgtacactcttacttatggaagacccactttacagcacctcaaacatcttaaaatatattcatctcccacattaaatataaggtatatataatgacataagaattgagtagtaaccagttgatcagatgttttgatttgtagatattcagttctacatttattaacttatattctttatacttgagaccagtacaattttcaaggatcaaattttatacattctattttctttttcttcttttttttttttttttttttttttgagacagagtctcattctgtcaccaggctggagtgcagtggtgcaatcttggctcattgcaacctccgcctcctgggttcaagtgattctcctgcctcagcctcccgagtagctgcgattacgggcacgtgcaaccatgcctggctaatttttgtatttttagtagagacagggtttcaccatgttggccaggatggtcttgatctcgacctcatgatccgcccgcctcggcttcccaaagtattgggattacaggcatgagccaccgcgcccagccccaaattttatacgttcttaaaaagcatgcagaccttcagcacgaggccaaatgaatagaatggtctggctgacacttggcaatccccagcaggctgccaggcactgtcagggcacatgagactctttggttagatgaattcgtgctgtttgcagacacataaagtggagcttggatccccttgcaaattacattaaaattgataaagagagaatgaagaagccagattgaactgatttacctgaaattaattgttgcatctgctacacacaatccctttggaattaaatagattttaaccccaaactgatgagataaaacacttccacattccagaaagtggctaaatctaactctaggtttatctgaatttatttattttattttattctaaaatatcaaagtagaacaactctgtaaaaaggcatatttggcagggacagtctcctgcccttccccccacacaaaagtgcttcattactttctattgcctgaaattattattagagatttatttcttgggcttaagactttgtatttgactgaagttcaagtacccttggggtaagtaaagcaccaaactttataagttatttactcctttgtctctgagttgatcggctctatttccaagagcagattttataggggaaacagatggctaacgccgagggaagcaggtggatggcgcagaggagaaggttctactgagggtcagggagctcactgaagacagctacagaaaaggcagacagaggctgggcacggtggctcatgcctgtaatcccagcactttgggaggccgaggtgggtggatcacctgaggtcaggagttcgagtccagcctggccaacatggtgaaactccgtctctactgaaaatacaaaaattagctgggcgtggtggcatgcacctataatcccagctactcaggaggctgaggcagaagaatcgcttgaacctaggaggcagaggttgcagtgagtcaagatcgtgccactacactccagcctgggccacagagcgagactctgtctcaaaaaaagaaaaggcagacagaggggcaccgaagacacttccagcagagttccatagactcacctccaggccatccatgcacaacttaaaaaaagatgaaagataaaatgagagagaagaagaaatatagattggggcaacagatgatgaaacaatgcaaagaagaaaaagagaagagaagagagaggagaaaatccagagactgagagaatccactaaaagaggaggaggggataatcagaaagaaaaggaacagataggctgggcacggtggctcatgcctgtaatcccagcactttgggaggccagggcgggcagatcacgaggtcaggagatcgagaccatcctggccaacatggtgaaaccccgtctgtactaaaaatacaaaaattagctgggtgtgttggcaggcgcctgtaatcctagctactcgggaggctgaggcaggagaatggcttgaacccaagaggcagaggttgcagtgagccgagattgcgccactgcactccagcctggtgacagagcaagactctgtctcaaaaaaaaaagaaagaaatgaaaaaagaaaaggcgcagataataaacagaagtacaagaaaagagggaagaagttgagtcacaaaaattctccagcagtatccttgctttatttttcctgagatgagttttcatcttttcagaccctggtgtccatccctggtcaggactcttcacttgctgtcttaattgccttttcttggatgggaggttggtaagtggtgaaccagcatttatggagtgcctactgcgtactggcctctgagctgagcactttacttcattatctcatttattcttcatgcctgtcctataagaaggtgttatttctaccatattacagtgaggactttaggcttaaagattttaagcattttcccagggtcatacagccaggaattttgtggaactgacatttgaacccgtaattgtctacaaagtcaagcatgattcttcgtcttacacaaggtgtcccctatataagcccttttccccctaaggactgtttcccaccaactgtctctatttctaaaatattaccaacccagtcaagaagaattctggaatccatttccaatatatcccctctaggtacctcttatgtattcttcagctggagaaacacagacttcttttcatagcccctatgactatctctacattaaaaaggagaaaaaaaagtttaacaattaatttccctaaaattttattgcctgtttgggttatgctgagtctaaaaacaagatcatttacctaaattccagagtaacctgctcccactcttggttgaatttaacatgggtgctcgttccagaaaaagaaagcaacattaataacacatcattgtcagtgctaccaaaagaagaatcctcaaaagtccttattctcagcactgttttcccattatgatcacagacttttcaaatgatgttcttgtccaaagtcccagggggaaaaaagggaaatgagatcactctatgagtttatttttccttgacacatatgggaagggagcattgctgagtttgtaagcaacttggtgggtctcattccgggtatttctctaatgctacagaatacccccactgacttcctaatgaaatgaagttgtaatgaaagccatatggagaaaggcgtcatgtttactgcctgcaccagtgtggggcagggctagtgtcacacatacataggcaatgtgccaccatcctaaatagctccacagtcaccagcaatcatttcctctggccagggtattgccatggtgggaatcatctgagctgctcacaaatattctgattctcctccttccaggcacataacgaaactgtatttcctcagccctcctcctgaagttgggcatggccacataacttgctttggccagtgaaatataagcagaggtaatacgtgtccttgttatgcagaagcctgtaggagccacttcctgagttgccatatcctttttcctgccttagaaatcatggaaacacattgagacagagcctccttcagcctgggtccctgcgtgtactcacagtgatcaaagacccataccaactcatgtgggaaatggagcaggaccaagaactgcaactttcattgttagaaacaaccagtaattttgttgaattactgcaacataacccagcctaatcaggttatactgaaattagtatcaaaagaagatgctcctaaaacagaaacctaaaattttggtactggcttggtagtcaggcaatgagtggctgggaaactattaacggaaagcagaaggatgacaattcatgaagtgaatttatgaaattatgaagtgaaattatgaagtggtgaaatatttggcaaaactaatacctgcaattacttggaaggcaaataatatacctaatgtacctacagctctaggagaaacagttggaaattttagtgttaatggtgtatattaggcattgccgactgcatttggcaaggtattatacaaaaaatatgagcttctgaatgaatcagacatcttgcaagcagaaaggaaagggaatagagagatctcagaaatttggcactttgcaaaatgggaaaagctgaactgattttaaacctcaaaaatgagacttttaaaaattgaagaggcatttatttacacaaccaaagccaattaaaactcagccttgcaatatgagtcaaattaaatgtatgactataacctactattaaaacctctgaattaaagtatctcagagtatgaatccaacaaagattatggcatccagtactgtattagtctgttctcatgctgctataaagaaatacccaagactgggtaatttataaaagaaagaggtttaattgactcccagttctgcatgcctggggaggtctcaggaaacttacaatcatggcggaaggggaagcaaacacattcttcttcacaaaatggcaggagagagaagtgccgagcaaagggggaacatccccttataaaatcatcagattgagtgagaactcactcactatcatgagaacagtgtaagggtaaccacccccatggttcagttacctcccactgcgttcctcccatgacacgtggggattatgagaactacattaaaaataaaatttgggtggggacacagccaaaccatatcaagtacatatttgcattcagagagactctctcaggaaaaagagaacagaacaaaagggtaaaaagaaaaagggtatagctctcctactgaagcctcataggcttaagataactgaaattaagagagaggcataggagcaagaaagcaaagaaatatagaaaatttaagaagtatctagaaaagaactccatgttgtagctattgctacttgtagctgattgaaatcaaacagattagaaaccaactaagttcttgaaagaactcaacatcaagagaaatctcagtctggattaaaagagactgttgctgcttaagacttaaaacaacccttgggccctcaactatctacaggcaggaagtgggtgagaaagttttaaaattgctaaggatggcttgtgcctgtaatcctagctgctcacgaggttgaggcaggaggaccgctcacttgaggccaggagttcaagaccagcctgggcaacatggcaagatcccatctcttaaaaaattgctgaggaaaatataatctctaatatccacttcagatgtggcccaaggacaattatggaaaagaaataaaatctcagaaggcagagtcaaggaccacaaagaatagtgtctatgctcatgaagcaattgggatcagaactaatcaaggaacatttcccacccaaaggataggggccctggaaatgtctgcccagtgggatttcagaattactacaaagccctgtcttctgtttctctctcattgtttctctttccaaatggaagtatttattgcagttacccagtcctgttccaccagtttttgaatagtgaggactgaatagataattttgttttttttctttatagttcatggcttttcagatcaagagagccagacctgatctagaagatatcatggatcacccatagttatttctatttgatagcattttataccttgttaaatattttcacacattttgtttcattcttgcaataactttgaaaggtagacattttcattctgatattgtaaatgaggaagctgagacttaaaatgttaaatcactttgcaagtttactagcaaaaaagttatttattatggtgctttctaataactagcttgaaaagaattttacacagaagtaaaattttaaatatcgtcgagtggggagaaagatggataaacacgaacaaaaagatctataacctaagatgctacgtgggaaacgggcctgagtagggcagtaatggggaatctgatagccagggagtaacacatgagcatattgtcaagggagattctggggtacataagtagactgcagttgcctggggaaaatgttgttaacattgaggtttactttggtgagctgcctaagggtagactcttacatctctcacatataaaataaaatacggaattgttttatgggataagaaaaaacagctttgtgtaagcctttcatttctgttgtttcctctggataagggctaagaacactcctggtcacctttcttagaaagttataaatgtcctgccaaacctagacattctgaccatgacaaggtagcttgtaaccaactaactgtcactaaaaatgattataaaggctggtttgagatatatataaaacaactgcttgaaggcattgaagggcaactaaaacagtccttaaaagaacagaagggccaggcacagtggctcacgcctgtaatcccaacactttgggaggttgaggtggatcacttgaggccaggagtttgagaccaccctaaccaacatagcgaaaccccatctctactaaaaatacaaaaattatctgggcgtgatggcccatccctgtaatcccagatactctggtggctgaggcacaagaatcatttgaacccagaagttggaggttgcagtgagccaagatcgcgctactgcgctccagcctgggtgagaaagcaagactccatctctaaaaaaattaaagaaagaaagaacagaagcatctaaggtgagtgtcatattcccccaagttttaaaggacatttacaaatgtgttaggaaataaatctaaacagatttttttcttgacctcatgaccttgatctcttgacctcgtgatccgcccgcctcggcctcccaaagtgctgggaggcaacaaagcctggagttcaaaactgtcaaactgtttgagacttgagatccaaaatcctagaacaagggtgatcaaagggaagtgagccccaaaaatttgtgtgtggatgccgtttaaatccctaattgactcatacctggtggaatgaacagcttaagactccaagaaatccagaggaaaaatataacagtagctgggaggctaaagatctggcagatatttcaaaagtcacataatcttaggagttcatgtcctgctaaattgaaagggtactaataaacacctcaagcttccagtggagacttcaaaaggaccaaactctaggagtaaggacacttccctaggagaaaaaactaaacacaaagcatgaaggaaaacctttaaatagaccaggtccagcaacagctaaaatcaactcttagtccaggcatagtggtttatgcctgtaatcccaggcatgggattgggaggctgaggtaggtagattacttgagcccaggagttcgagaccagcccgggcaacatggcaaaaccctgtctccacaaaaaatacaaaaattagcagggcacggtggcacacacctgtagtcttgactacttggaaggctgaggtgggagaatctcttaggcctgggaagtcgaggctacagtgagctgtgatcatgccactgcatcccagcctgggcaacagagtgagacccagtctcaaaaaaaaaaaacttttaaatacaaaaataaaataaaatcaggggctgggcgctgtggctcatccctgtaatcccagcactttgggaggccaaggcaggtgaatcacaaggtcaggagtttgagaccagcctggttagcatggtgaaaccctgtctctactaaaaatacaaaaaaaaaaaaaaaatagctagggatggtggtgcacacctgtagtcccagctacttgggaggctgaggtaggagaattgcttgaactcagcaggcggaggttgcagtgagccgagatcatgccattgcactccagcctgggtgacagagtgagactccatctcaaaaaaaaaaattaataaaataaaataaaatcaacccttgatatatcaagatgagctgtcagtactctactggtctgccaaaaacaaaaatttaaccctctttgaaggaagatattatctagagctgctacaattttccatctttaatgaccatcatccaattaaaaaaaggtatactaaaagaaggaccaaatcattgaaaacaaaggggaaaaaaagaaaaagatccacaggtgattcatatattggagttatgagacagggactcataactccaccgatcccagccactcttcaacataatctatgaaagctagaagacaatgggaacataattttaaagtattgaaagaaaagtctctgccaaccaagcattctatttccagcaggaatagagtttaaagacagggactttaaaatagctaggactaatatgttcaagaaaacatatatgtttgtaatatgttcatgtcaccaaagacctagaatcagttttttaacccaaatggaaattctggaaccaaaaattagtgtgacaaaataaataatttaatatatgaatttaataggttatcagaacaaatgactagcgaactagaaaacaagccagtagaaaaaaattccaacttacacacagagggagaaaatgatgaaaatgtagaaaaagtcttcagagatacatgcaacatggaggaaacaatctaactttcctgcaattagtgtcccacaaggagaagagggagtgattttaaataaatactggctgagaatttcctacaactagtgaaagacatcacaaacacatatccaacctcattcaaaagcactaaaaacctcaggcaagataaatataaggaaaatcacacctgggaacatcatgattttgctcctgaaaattgaagagcaatagaaaatctttttttttatttttatttttgagatggagtctcactctgtcaccaggctggagttcagtggcgtgatcttggctcactgcaacctccgccttccgggttcaagcagttctcctgcctcagcttcctgagtagctgggactacaggcacgcgccaccatgcccagctagtttttgtatttttggtagaattggggtttcaccgtgttggtcaggatggtctcgatctctttacctcatgatcggcccgcctcagcctcccaaagtgctgggattacaggcatgagccactgcgcccgaccaagaaacagaaaatcttaaaagtagctagaaaaaaaattactttaccttcaaatgagcaataagactgctagctaagttttctttttttttttttttttttttgagatagagtcttgcactatctcccgggctggcatgatctcggctcactgcaacctccatctgccaagttcaagcaattctcctacctcagcctcctgagtagctgggactacaggtgcatgccaccatgcctggctaattttttttctttttgtatttttaatagagacagcatttcaccatgctggccaggctggtctcaaactcctgacctcatgatccgcccgcctcggcctcccaaagtgctgggattacaggcgtgagccacctatcctggccacttttcaacataatctatgaaagctagaagacaatgggaacataattttaaagtattgaaaggaaagtctctgccaaccaagcattctattcctagcaggaaaaaaaaaatccaataaatatcccacatatccctggatatgaaacctctgtgaacttgttctgcatatggggagttgatgcccgatcattactaatgctccttctcaatatggaactatttttaaaagggggatataaaattatgaaatgggaaccacttactagaaaggatttgttatatttgtgttaaccataggtccctagaatagcactgtccaatagaaatataatgaaaaccactaatgtaaaccacagagataattcaaaattttcttggagcaacgttttttaaaagtaaaagaaataggtgaggttaatttttaaaatatattttatttaatccagtatattgaaaatattgtcatttcagcatgtaatcagtatgaaaattattgagatagtcctactttttttgtactaagtctttgaaagctatgacacatctcaatttgtaccactagcatttcaacttctcagttgccccatgtggctattggctaccatattggacagcacagtaagggatgcaagagatgtactaggcagtggttctcaaccctagatgcccatgagagtgacctcagtgaggagctttaaagaatgcagatgatggccaggcacagtggctcacgcctgtaatcccagcactttgggaggccaaggcgggtggatcacctgaggtcaggagtttgagactagcctgaccaacatggtgaaacctcatctctactaaaaatacaaaaattagccagacgtggtgccatgcgcctgtagtcccagctacttgggaggctgagaaaggagaattgcttgaacccaggaggtagaggttgcagtgagccaagatcgtgccactgcactccagcctgggtgaccgagtgagactctgtctcaaaaacaacaacaaaaaaagaatgtagatgcccatgcagggctgcgattagggtaaggcaagtgaggcactcttcctgagcacaaaacttaaggaaaacacacacacacacacacacacacacacacaaccctcattaatataagtaatattttagtgcaatattttaacaatcaaaattactgcaaaaaattcattaggaataaaatatcaaaatttttaatgaaaacaggaccagattactgattttttcctttgccttgggctccaatatgactcagcatggccctacgcccatggcccacccgagaccaaataaatcagcatttctggaagtagagcccaggtattagacgactctaatgtgcagccagcgttggcagccactgtttagccactgtctgtactaaagctcagatttcttgataaagtgggaagttgatgagtggtcctaattctggcatgtgatttcttttaccaaagccccaaaatatagtttccttttttgagcttccagtgatgggaagttcacaacttcacagggcaggcatttccactgttggacaactccagggttacctcttatttatttggagaaaacggttacaagataattttcaaagaaaaaaaaaaaggtaaagccatgcctctcctacagatgtaaaaataaacacatgataaagattttatttaacagaactgccaggcacagtggctcatgcctgtaatcccagcactttgggaggctgaggctgggaggatcacttgagcccagcagttcgagaccagcctaagcaacaaggcgaaaccctatctctaccaaaaaacatatacaaaacttagctgggtgtggtggcacatgcctgtggtcccaactactcaggaagctgaggtgggaggatcacctgaacttggggacatcgaggctgcagtgagctgtgattgagccactgaactccaacctgggtgacagagtgagaccctgtctccaaaacacaaaacaaacaaaaagagggaactaggcagatattataacgggttcaaaagagaatcccaaaacagacatctttatagatcaggaatattgaaatttgcacatggaggcaaaataggattttccacaaggggaacaggaaagggaaatcaactgagcctttatcagactagacagaatttgcttgtctatcagttacctatactttacaaaattgtaaaatatctcccatagaatcaatctgataaggcagcagggagtgctatagaccagcaatccccaacctttttggcaccagggactggtttcatggaagacaatttttccatggacgtggaggtgggtagagggagtatggtttcagaatgaaactgttccacctcagatcatcaggcatcagttagattctcataaggagcatgcaacctagatcccttgtttgtacagttaacaataggtttcccgctcctaggagaatctaatgccaccgctgatctgacaggagacggagctctggtggtaatgcttgcttgcctgctgcttacctcctgctgtgtggcccggttcctaacaggccacagacctgtctgagacagatctggtaccagtccacagcccagggattcaagacccctgctatagacaacacagtttcccactgaagtacaaattattttccacataacaaattgctaccatatatacatatataattttttttttttttttagacggagtctcgctctgttgcccaggctggaatgcagtggcgtgatctcggctcactgcaagctccgcctcccaggttcacgccattttcctgcctcagcctccccagtagctgggactacaggcgcccgccaccacacccggctaattttttgtatttttagtagagatggggtttcactgtgttagccaggatggtctcgatctcctgacctcgtgatccgcctgcctcggcctcctgaagtgctgggattacaggtgtgagccaccgcgcccggccaattttttttgagatggaattttgctcttgttgcccaggctggagtgcaatggcgtgacctcggctcactgaaacctctgcctcccaggttcaagcgattctcctgcctcagcctctgaagtagctggaccaccatgctacttttcaccatacaacatttcaccatgttggccaggctggcctcctgggtgaggtcaggagttcaagatcttggctcactgcaacctccgccttccgggttcaagcgattctcccgcctcagtctcccaaagtgctggaattacaggcgtgagtcactgtgcccagcctcccctatatttttttaacccatcactcttagaacagtggttttcatattttgatgtacacaagaatcatccaagaagtaaggtaaaagacagagtgcctgccaagtcttctgagcttgcatgatgcccatgaaaatgcctttttaacaagcacactagatgattctgatgcaggtgttgaggatcatactcaaaaagcacagttctagaacatatttactccaaattctagaggcagcctttccaaatgtgttctcataatatctgaaggtagctctagatttcaaatcaaatcaatcttagtagtctttctgtgccagtaacattttctgtactttgtttctgagataatatactatttcttttctccccattcaaattttacaggaaaggcaaggaactgtttttatattatatgagcacctgaagagacacaagttgggaatgttgtgagtatgaagtgtatctgtgagttgcaataagctaaagacaatcacaactaacaagaatgatgcttctcatgcattttaatcagcatgctgatttattagaagtctatctttatttagatcttcaggtattttattttattctatttttttgagacggagcctcactctgtcacccaggctggagtgcagtggcgcgatctcagctcactgcaacctccacctcccgggttcaagcgattctcctgcctcagcctcccaagtagctgggattacaggtgcgtgccaccatgcccagctaatttttgtatttttagtagagacggggtttcatcatgttggccaggatggtctcgatctcttgacctcgtgatgcacccacctgggcctctcaaagtgctgggattacaggcctgagccactgcgcccagcctaggtattttataaaatgactttagatgtgtcaatgggggtttataaatataattgattaattacctaaaattaatgggtaagatttagatttaacaacatattatacccaaatgcatacacagataaggcacatcagatctcactgatggggacccagctcagttgtcctgcctgtggaaggcagttgtcattctggcatacttagaaaagtgctctgtgctctggtgacttcacacgatgtccccctaacaggcaggatctgtagctcctcctcagatccagtttcaacccgggcgcagtcttctcaaggtacgcatgcactgagcacaggctgctggcaacactcggaggcttccgcacttctcccagatttccctctgggatattttggagcctagcaaagcctcctatctaggactcagaattttagagctacaaccttgagtcatctcttatttcatatcttggcacatggttacttggtacctttaagtcatcctacctaattgggaaactgtctctgccctctatttctcttccttgtaacctctacagcagtgtagacattgtggcctcacactgaaacacacagaaacatatacacaaagatctggtctcataaaaactaaccaaataagagccaattcctctacgaagcactgatgttcctatgtggcctcagtccctccctccccaacctcccctacaccctactatggtcagtctcccggaaactgatccaaagaggtgcacactacaagcaaatggctgcataggacaggcctcaacttccctatccaaagcatagtcctttgttctaccaaagcattatcagttagaccattatcaatacagtgatattcaccctcatcgatccttttgaacttaggcaaatgttctggtttcttctcccttgcaactagaatgtggctacaatttaatctggcacttacagtctcagatgcttcccatcacctgggaagggaagctggctgttttgagtcctcccctccagtttcagtcttcccccaagatcccataaacatgcaaaacttattgggtcttgttaagaaagtcacttccctagggactcttcacccatttgtcacactgccctgatagcaacagaaatgagacctcaatccataacatcccaacaagcttgccttcatcttctccacctaggccttcacatccagaatgataacagagccagggacacctctgggcatgtgcagggaaggatcagccccttgcttcccagtaacattctgcccctcagctccctccctgccccacccttccttaccagaaaatttgaaagcattttatcaactgtgccaggcacagttctaggtgctggggaaacaacaatgagccctgccctcaggaagctgccactctagaggggtgggcatacagtaaacaagtaaacaggtaaacgtggtctagtatgtcaactgctgacaagccatgaaaggggagcagcagttcactagtagccagaagatcagagattaaatacttcccatttcactctccccaaacttgacacggtgatgtcagggctgggcagaacataggccaccgggaattaccgggactaggagaaccaagcagtcatctggatttgaagttggcatgcatgggaataagaaatttgtattttcccaacttatgaatcgagttaagcaggcaacattcaaggtccaagtatatttctaagcccaggaattcagacagatgggttagttaggtacaaagaactagaaatcagaacctagagatatgaactgtgtcttactgggcaccagctggcatgaaagattaactacaaaggagaagctgggacacgactggaaccagacaaacccttttgtacataggatgaggctgggagaggtgagctcccttcgggtgatgggagaagagcaatcagacaggccaaacactggacccaggattcagatgcgtggaggtcatcctgagaagcaaccagctcataccatcaggaaaagttccaaccgcaaagagtaaagggacaacctgagagctaggtcgtggggagcttgaccagaggcactcagagaggaggccacttttggagacccaggctggtagggggtggcatgaggaaagcctttcagcaggcagcagagcccagcagaggctgacactcaggagcaggatgtgtgtcctggaattgatgggatgagacaggggtagtatcacccaggcagaggcagggttcctgaagtgtgggccacaggaagagcagtgcaggtgggtactcgggcatagaggaaccaggcaagaggaaaaccatcacagaaagtaggagatagaggaagagcctgtttcatgaacagagaaactcccagtcatcaaactgacctagcagcaaggtggatctgatgctgaagcctacagaattaataattagactggtaaccaagaggaacttgcccagctgtccctacacctgtacctgagatttcaggcaaggatgccttgacctgcaggctagtttcaatggtagaaatagtcctattggtgtaccttctagatggttattgctattcacacatccttcagggagggcacagttgacatggacctctcgaaagcctttagtccttttctactgttttctgcccatcttaatctcatccctaactgcagtcatagaaccacagaatgttagaacagggaagggcctcagaattaactgatcctcatagatgggaaactgaggcttagagaggggcaatgatttgcctgggtcacacagtaggtggtctgtctcctgatcctgaacttggtgttcctttcactataccacaaagcctacactgagtgaccaccttatatagggagccctataatgctacaggatagtttgcaagctatctccgaaatcttaaagtggatgttcaggtttataaagacggctgttcatgaacagggcacattctcctctgaacataggcaggacactctcattaagtgataggaatcacttgtacctgtgaaatagaaaataaaccctagacaaaagactccagaatactgagatgcaaatgtctccatagacaaggaaatcattcggcaaggatcacacttagcgacagttctcctaaagtaacttaaaccattttttttaattattatactttaagttatagggtacatgtgcacaacgtgcaggtttgttacatatgtatccatgtgccatgttagtgtcctgcacccattaactcgtcatttacattaggtatatctcctaatgctattcctctcccctcccctcaccccacgacaggccccggtgtgtgatgttccctaccctgtgtccaagtgttctcactgttcagttcccacctatgagtgagaacatgcggtgtttggttttctgtccttgcgatagtttgctgagaatgatgggcttaaaccatttttaaaatgaactcgtacaacatcctagctcagtggtagactttcgctagaaatgacctaccctattggtatattctgctaagttgattaataaaaaatatttattacgcaaatcctttttgttgacaagttaaaatggagtctcatctttcatatctccctgaagattgccaccttgtgagattgaaaatactcattaaattccatcaccagacaggcacaaatgagagggcgattgtttttaagcatgtgaagggaatcgttggtaaactcatttgtttggatatcattaacagaacaatcggcgaggatctccagggggtcctcatgacctttgctcgccatctcttcatcatccatcaagaaatatcagcacctaatatgcaaggcgagaccaattttaaggtgaggtgttaattaactaacgattctggttaatttctatacaagggctgaaaatacctcatgctgtattgtaaacaagtgctaaaccatcttttttttattgtaagcagtacatattttacagtgtgcagggtcaatactgtaaggttcccactgaggctgttagttaaatttaatagtttgaaactttttctttgaaatagagttgacttttaacttgctgccattttcaaactccagctcctaagatagcagatctttctgatgttggacgtgagtctgaaatgtcacaatggaaccaaaacagagatcgtcacaaccaaaaattgcgaatgttatctatctatattccagataatacaaggtctgactagtgattcctgggaagccctagtttctagagccagagaagttctaagacccgagaaagcaatgtgtgttagggagaagcagaaaatatagcatgtatgtgggccatctaccccacccgtttctccaccgtgggttggattatttcactactaacctttagaagccttcttatgacctttaaagatgttggtctatcaaatccagttgtgtataattgactagaagtctccaaactgtaaactacaggaacaaggtctgtacgggagtttctgaaatactgtctgaacagagatgatcacgtggtattgaacagcaaggtatgaatctgattcccagcctaggccttcattaattcaaaggacacaatcagaaaccacatgtagtttttctcctaaatggaaagtccaacaaaagcttaatagaaatgtaattttaattacatttttgattcaagctagggcctaactcctttagtaacagtaacaataacaatgtgattttatgagctggaagaatgaccactgctttccctacaacatgattgagaagattcaagaaaagacagaccaaatgttacatcagtgttcactggtcctaaaggatctatgctcattatttactggtttttgttttgttttgttttaaagagacaggatatctcactgtcttgcctaggctggtctcaagctcctgagctcaagggatcttgtcttggcctctcaaagtgctgggattacaggcatgagccaccttgcccagcctatcatttacattttaagttcctgctagctagtagcatcatcttatctgttagtgccatgtgcaaaactttgagcctctctgcatttgatccattcagcctgtccaaatatagctaataatcagaatcagatgctttaacctcaaatgcattcagactaagttgattctgggcttgtctcgctgtgggcagagtcaaccacctttgacaaaatgaaagctatttctctgccctttctctgactttcaaaatcataaaaagtcagatgttcttaggtagcttttaattatgtcatggtttctagccttctgatatgaatgtttgttttcttgatttttactcatgttaggtctaaaggcaaaaactttcaatctcagtaatataggtacaataacaaaaacttgaagcagtggaatagattcatctttgctaatattttctgtctcctacttagtggcattgtggtaggtattttcagtttttaaacaaggatttaccagcaaagtaaaggctaaataaaaatggaaggtgattgaggctgggcacaatggctcatgcctgtaattccagcactttgaaaagctgaggtgggcagattgcttgatcccaggagttcaagaccagcctgggcaacatggtgaaaccccatctctacaaaaattacaaaaattagccaggtgtggtggctcatgcctgtagtcccagctacttggggggctgaggtgggagaatcatttgagcctgggaggttgaggctgcagtgagtctgggtgatgggagtaagaataaaaaaaaggaagataatgcagaaaatgcatttaacaaaatgtaacattcttttctgataaaaacattcaacaaagtaaaaatagaaggtaacttcctcaaccttataaggacatctaccaaaaaacccacagctgacatcatagttaacattgcaagaccaaaagccttctcgccaagattaggaacaagacaagggtgtctgctcttgccacctctattcatcattgtactggagttctggacagagaaattaggcaagaaaaggaaataaaaggcgctgggtgcagtggcccccacctgtaatcccagcactttgggaggccaaggtgggaggattacttgcactcaggagtttgagaccagcctgggcaacatagcaagacctcatctctactaagaagaagaagaaggagaaggagaaaagaagaagaaataaaagtaaaagtatcggccgggcacggtggctcacgcctgtaatcccagcactttgggaggccgaggcgggtggatcatgaggtcaggagatcgagaccatcctggctaacaaggtgaaaccccgtctctactaaaaatacaaaaaattagccgggcacggtggcgggcgcctgtagtcccagctactcgggaggctgaggcaggagaatggcgtgaacccgggaagcggagcttgcagtgagccgagattgcgccactgcagtccgcagtccagcctgggcgacagagcgagactccgtctcaaaaaaaaaaaaaaaaaaaaaaaagtaaaagtatctctgtttgcaagtggcaaattcttgtaaatagaaaatcctatgaagcaagaggactgcttgaacccaggagtttgaaaccagcctaggcaacataggcagaccctgtctaaaaattaaaaaattagccaggtgtggtggcacacacctgtggttccagctactcaggaggctgagatgggcggatggcctgagtcaggtaggttgaggctgcagtgagccatgatctgcactccagcctgggtgacagagtaagacctagtctcaaaaaaaaagaaagaaagaaaagaaaatcctaaagaacccatcaacaagtttataagacataaaatcagtatacaaaagacaattatatttgtgtaatgaataatgcaaaaataagttttcaaaaaattcaagttacaatagcatcaaaaagaataaaacacttaagaataatttttttttcttttttgagacagagtctcactctgtcgcccaggttggagtgcattgatgcaatctcggctcactgcaacctctgccttctgggttcaagcaattcggctgcctcagcctcctgagtagctgggattacaagcacgcaccaccatgcctggctaattttttatatttttagtacagatggagtttcatgttggtcaggctgacctcgaactcctgacctcgtgatccgcccgcctcggcctcccaaagtgctgggattacagccgtgaaccaccgcgcctggccaggaataaatttaacagaagtgcaagatttttgcagtgaaaactataagacatgggtgaaagaaattaaagaagacctaaataaacagaaagacagtctgtattcatccaatagaagacaataaggctaagatgctgacattcccaaattgatctatagattcaatgtaattcttatcagaatcccagctggcttttttgcagaaattgacaagatgatcctaaaattcatgtggaaacataggagacccagaataaccaaaataatctcaaaaagaacgaagttggagaagtcacacttctcaatttaaaaacttactacaaagctacagtaatcaagacagtgtggtactggcataagaatagagatatagatcaatggcataaaattgagtctgaaataaacccatacataatggccaataatttttggcaagggtgctgaaacaattcaatggagaaaaaatattttttaaataaatggcacatgcaaatattaagttggacctctgcctcacatcatatataaaaattaagttaaaatgggccgggcgcggtggctcacacctgtaatcccagcactttgggaggccgaggcaggtgggtcacctgaggtcaggagttcgagaccagcctggccaacatggtgaaaaccccgtctttactaaaaatataaaaattacccaggcatgtggcatgcacctgtaatcccagctactcaggaggctgaggcaggagaatcacttgaactcaggaggcaaaggttgcagtgagccgagattgcaccactgcactccagcctgggcgacagagcgagattccgtctcaaaaaaaaaaaaaaatttaagttaaaatggatcaaatatttaaatgtaagagctaatactgtaaaactctcaggaaaaaacatacgtataaaccttcatgaccttgggttagcaatagtttcttagacatggtgcctaaagcacaagcaaccaaaataaaaatagataaatcagacctcatcaaaatttaaaacttcgtgcatcaaagaacactatcaagaaagtaaaaagtcagaccacagaaagggaaataatatttgcaaatcatatatctggtaaggcatagtattcacaatatacaaagtactcttgtactcttacaactcaactacagaaggacaaataacccaattttaaaagggagcaaaggatttgaatagacatttcttcagaggagatatgcaggccaactgcagtgctcacacctgtaatcccagcactttgggaggctgaagcgaaaggatcacttgaggccaggagtttgagactagcccaggaaacagagtgagacctcatctccacgaaaacttatttttagctagccaggcatggtggcacacacctgtagttctagctgctcaggaggctgagtggggagaattgcttgagcccagaaggtcaaagctgaagtgagtcataatcacaccactgcactccagctttggtgatagagcaagacctgtcccaaaaaaaaaaaaaaaaaaaaaaaaaaaagatgtacaaatggccaataagtatatgaaagaatgctcaacatcataagttattagggaaatacaaatcaaagctacaatgaaacatttcatacctaataagatggctacagttaaataaaaaggcaataacaagtgttggtgaggatacggagaaaccagaaccctcatatattgctggtaagaatttaaaatggtatcacagatatgtaaagcttagcagtttataaaaaaaattaagtataaaattaccatatgacccggcaattccatttctaggtatatgtctaagtatattgaaaacatgttcacacaaaaatgtgtacattaatgttaatagaaggaatattcataatagccaaaaattagaaacaacccaagtgtccatcgactaagaaataactgaattttattatattctatggataatattttatataatgggatattattcacctctataaaaggaataataaagtactgatccatgctgcaacatggacgaaccttgaaaacattatgctaggtaaaaagccattcacaaaaggtcacatattgtatggtttcatttatatgaaatgtgcagaagaggtagatccatagagacagaaatagattagtggttgccaggggctgagggagtgggatgaaatggggagtgacagctaatggggacagagtttctatttggggtgatgaaaatgttctggaattatatagtagcgatggttacttgcaaatatactaaaaaccactgaattgtatactttataagggtgaattttatggtatgggaattgtacttcaataaaatataaacaaagtaaatgggaatgtgtcatttttttcttcccagcaaccaatggaaagaaaccttcccatcagcctattagccctcattttagggtgactagaccaatgcttctcaaattatccataataaggaaactatttgttttgttttgattttatctgactatcatggatcaacatttttaacaaaatagaagaaaatttaattactagaaaaatacgattaaaaaaattaaagatgtacaatttagaagcccaatgttattattagacataataggcataaaaattctaaaaagttttccaaattcttactctcaatttttttactcatttcagcaagactggtaagccataatctgtagacaaatgccagttggtagaatacattctgaatagaactggtctaaaccatggtgaactcccaaaaggaccagatgcttgggggagagggattgtaagaggtctttaagtaataaatattgtctttatttacagaccaccattgctgatattgaaactattctaagagtaacaaaggaaaacaaaatgagatttgaagaggagcaacagtccaaagatgataaaaacctctctaaacccaagaaatgatcctggaatacagtacataacaatttggatcccagtctggaataaaaagggcaatttttttttctgttagaaataaaagccaggggaaattggtttgctttgtgtgctaggaggtgaatcagaacagattataatgaaatgctctttttaaaacattgtttattaagtgatcttattttatttattaaaccaaaacttatttgtgttttcatttgagagtgttgaacaatcccttcttcttctcaaactcagaaaaaagtaatctgataaaagaagaaagttaaaagtcttactgatatcacctccgcatttacttcctcataggcctcaggattatgtagcttttattttttatgttttataaagttttctcctatttctaatagtccatcgatcttctgcatttataggtttgaataaaggcttaagaattgctatttgtcaaaacacaaatgcctttttttcaaagcttcaaattatattgaaattatatttatatgaatttttaagtgactatcattcatcgtgtttttgttataccaagccactattgtctgctattgttgccatttttcaaaaagtaggataagccagcatctagttaaccaaagcatcagaatgtatctaggtggcagtatctgctcttagtttaagatggagtgtagctcgagctctgtagcttgaataaacatttgtattctctagttctccatttaatacagcagtaggattttttcaagtttagttcaacattatactacctttaaaaaggcagactgttaagattgtagtagtgctgactctaactttcagcattcacttcataattgtccaaaaatatttccacatcagtgagctttactgaagggtgaaataaaagcaaattacaacaccaaaaccattattgttttaaagaatgacctttatgtctataaaaatattttagtgtattggggaaaggaataggatttttacctgtggaatttcaataatttgttaactgtgattcagccacaggctaagagtttctgtaataaaattaacatttgtgtgtgtcagcttttgttttgctatagttggaaatacattaattagccaggtttcctgcctgtgctaggtacaacactgacctctttttcttgccagatctctctaatccattcgaggggcccattgttcagacacttgacagataggaagtcctacatgcccattagagccgcgcctcgactgaagccagagcaacataaggtccaagagactcattagttcactggcacaatcgtgtcctgagagtaaatgaaaccctctgtctccttatggctctcatctgctctggactttaaaagaaaactgtctccgttttgttcggcacagtagtggatcattcacatggtgagagcccctgcttaacagtacaaaactgttaaatctatcggaaagttttgcatgtgaattttgattagcactcccgaagctcaagctgctggcaatagcgaaacgatttcgccatcctacaccattgttttacccacttgattggtttctcaaacaatgccactttcctcctttgcagctatcatttgcatataccacagaattcagacctgtgaaagtgattgggagcagggttctctacgtaaacatctacagcttcaaaattaaaggagaaaaattggtataataaaacaatcacttcaagtaattaagtggaagaagccagaggaccagattaaattagtgacatgttttaattacagaacatttgaaaagaagcaatagtccattatcttttaacacatatatgttacatagatactgtgctcttggtaaactaaggcacgtttcaaaaaagaatcatttatatgtgtacaatatctaaagtatcctaaatgtattttagtcacgatgaattaattactgagcttttgctcttctaaataggaaaccgaaatatttggtggcaagaggattttggggaaatgatataccgttttccaggaagtttttgggagaagcacacattaaacaatagaggtgtctttgtatgagaaatgacccattatttaatgttgaatgtttgcagtggttggagagcattattggatataagtatctcccttaatatattacctattttatatggactttaaagaaaccaatgagattataatattaaatgtgctactgcccacctgtgctgcctacctatttagtgacctttccgtaagctacttacagttacctatagaacaaactgggggctggggatgtactgtgctggaagcttcatatacattatttgattgcatctttccaaaaactccacgcatgtaggtacaacaactgttctcattttatatatgaggaaattgagacagagtgtctcaccctatgtctcaggctaaatgaaatttgggatttgctgtcttttaccacaaattccagcatgttgtacaaagtagagggtttagtttcacttgtcccagatcatccaagggatttgcacatttttagaataacaaattctggtgtgttgcttaaaacatagaaaaaaacagattaacttatgcatacttcctgctaatgaaatgagcttgtacaactgacagcatggcaaggcactgcaattatgtgatcaaagtcagaagaaaaaaatggtgtcagtggaattctcctatggtgatggatctgtaagactggtggagaatgatgttggaaaggcgtagaatttggaagctgggaagtcatgccctgaagtttcgagagatgggtataaggttaagaaatcgtagaagcattgggaaaggcttccaacaaaatgtagaatagcctggaaggagtttggggagaattatttcagctatgtcatcctaagaattgtaagcgtcctattttttaagtataaaaatacgtattttatcacaagtaatatgttagtaaccatctgatagctttaacaattaataatcatttgtattcatttggcacctttcttccaaagagctcaaagcactttacatttgttatctcattaattcccaacactgtccctgtggggaaggtaataagtattttaacatttaaatgtttatctttcagaatttctcaagcatacattaattatatttccaaaaatgtaaatgttcattagttttattttactgttcctctggctttaatgtgcataacaaatttgtgcaactctttaaatgtactaatcatggtaaatcccatctggaaaaccgtaaatgaagttgccaagataatgtgagggtggcagctgggggacgggggaagcattcgactacacttttctcgctggaagaagtttggatcaacccatcgcaatgggctcttctgaatcttctccacatatcattccttccaagaggtgtgccacaggaagctcaggactgcatctaagagcttgaagccgatagagctactatttataccattgttttattaatgacttcatcagtggggaacagaaacttgaggcatgctgttaggaattacatcccaaagagtcacagaataataagggccaggaactggtctccccagccctctctgtctcgggcctggtcatactttcctcaattttctaagtagaaaaatggcagagcatatagtacctgctcctcagggaagcagtcgagatgaattggccaatgttgggagagtgtttcaaagatgaagcgttctatataaatgtttaagtattattattacatggctacttcaaatggaagttctaactttgaaatgtgattatacactttccaaaaaaaaacccttcataactacatatataggtttatttttcactctaacagtctaactcatggttgtgaaactttattgcagttgatggagggccttggcttttattagttttaaactgctggtttctggggtatttatgtaaatgagggaaagacaacaaaacagtaaataataagcatgtccctgctgtttaaaaatctgttggtgaaaacaacttttgttataagaagaccctaaatatagcacagaaaaatatagctttgccattaacattttgtttcacttttacaattgtcaccatatacatgtgcatcaccacacatgcacacacatacacacacacacacaggcagaaaggagagagagaagtgagcaaaatgctacattttaagatttttttatttaacaaactgttataaagtataccagatggctaattatagctcccagaaacaaaaggccacacccaagtttactgcaatcgcctcataaggaatgttaggatgaaatcatggtcccataaactcgacagcaaaaccgcagaccctccattggttgcgaaataaactccaaatcaaaattaaaattttgattcatttaaagattcatgccactttgtttcccaggagaggacacaaaatactttgcgatcattgaaaaactcaaaatgatttaggaacatgctctttgtttccagattccctttccacgcttttcattttcttgggctttatttttccaagttgaatatctataaacacattgctaagccaaaaaattagatcgtttgcaacaatagtgaagaatctaaaggtctaaatgttcagtaatagggtattgttttaaaaatatgaaatatctacattaaagacttctatacagccattcaaaaatcatgtttctacaccaaccatacaacccagccattccactcctaggtatttgcccaagagaaaagaaagcatatgtccatacaaagacttgtacaggaatgaccaaagcaacttggtttacaataccccaaggctggaaacaacccaaatgtccatcagcagatgagtgaattaaaaaatactgggatatccataaaatggaacaccattgagcaatgaaaagaaataaactattaataaatcaacagcatagaagaatctctatgttgaatgaaaaaattcagacaaaaaacgtacatacctatttaacattctagaacataaaaactatagttaagtagtaacctgaggatgggagatggggtgggaatagggtgaggaggaggaggaggaagaagattacaaagaggcagaaggaaaatgctgggtgatgggtattttcactatactgacatacaaatgatttattggatatatatagatgtcaaaacttatcttgtacacgttaaatactgtcaaagataaataagactggacactagtaaaagtggtaaggacagattttaatcagtaatacactattgcaatagggaaaagggtccagtgtaaactgaattcaacttcaatttctagagaggtgactgggcattgtaaggggagaatgagggaatagaagaggggacagtggctgctcggtagagtagggaagtgagaaataaaaaccaggaagcagggttggttcatgtgaaactcatctggttttgctaactgacacagaagttaggctcctatcctcccacagagactgggagacgggggccctaatttaggattggctacaagaaagtttattctttttgcagcctggagttttctcaggcaggtattttaagagggtgctagggtcatcttaggcttgcagccttgagctattagaaactatgttaatgtttgttcaagtcttcataggccaaggttaaggcctggtcaagaagagggctgggaggagcctggctggagtttagtcaaggagagaatctttgtcaatatgtgcagtttatgaatgtcaataatacctcaaaaagctgttttttaaaaatcgtgtattaggagaatatgttataagtgaaattatattcattaaaataaaatgttattactaaataaacatattttaaaatgttttcaatagcatgaaaactattgtttttattctaagcgtaatgccctttgtctaaatactctagaattcacatccagaccatgtctttgttgccatacctaatcaactctgtgccataccacagagaatgcataaaagggcaaatgcctccactcacctgcaaatatttggaaggacagagtagtgattatgtggcatctgtaggtattctaaatgggtatggaatatgtatgacatctatttcagatttaaatgtcttaatgggttttagtttcagctctttccttaataaacaaataatttctcttccttagttctcaggtttctgatacataaaataggaaagaggaactgatatttaagcttccttccagctctgatgttctacaattctatgccaccgtcatcgatgtatataaaagagacagaattgctgttgttgttgctgttgtttaatttcttatttttttaagatggagtctcactctatcacccaggctggagtgcagtggcgtgagctcagctcactgcaacctctgactcctgggttcatgtgattcttctgcctcagcttcctgagtagctgggactacaggcgcccaccaccacacccagctaatttttctatttttagtagagatggggtttcaccatgttggccaggctggtctcaaactcctgaactcaggcgatccacccgcctcggcctcccaaagtgctgggatcacaggcaggagccaccgcgcccagccaaaattttatatatcatgcaaggaggtggtttcttcttccagctttcttccatttattggaaacaatggatgaaaatattttgaaaatactttgccccttaaacgcccccatctactatccaaaaggcctatgattttaaatggttgcaaaatattgcatcattttagaatagttcattgcaacacatttttcttatggaagggagccatatgaagccaagtacaacacgtcctttacactgggatcatgtccttcattttttgggtttcattcttggcactgagctctcagttattgttaatcaacaaaactgatggaaacaccttattttgaaagcatttttatttgaactgatgtcatgtataccttctgcactagaagatcttgatggaaaaagatgaaatagaaatgagaataagaggctgggcacagtggctcacgcctgcaatcccagcaccttgggaggccaaggcgggtggatcacaaagtcaggagttcaagaccagcctggccaacatggtgaaaccccgtctctactaaaaattcaaaaattagctgggcgtggtggcggtcacctgtagccccagctactcgggaggctgtggcaagagaatcgcttgaacccaggaggcagaggttgcagtgagccgagactgtgccactgcactccagtctgggtgatagagcaagactccatctcaaaaaaaaaaaaaaattaaaaaaagaaatgagaataagaaactttaactgggcatttttgtccctgtacaaaccagagcatctctgggtagctgcagtgctgtctctgagctttaatatttgcctgtacccaaaaaaagatggaagatgcatttcctaatattccatcttgcaatataatccctggtgaactgcatacattagatataataaaatggtgaaactatttctacctgacacctttaatcccatcttctaaagacatcctaaaatgccaccatgtttcctgggcaccatcaaccagccggcaggcacagcctttttaggaagtattctgacattcatgcagcaaggtctggacaaggagctgaaagcaagatgattctatatccctctacaaagaccacacttgttattatgaccaaaacttatgtgtaaacacttctttgaacttcatcgccaaggcagaaacctctctgctgcttttattctcactacggctcataagatcttggcactaacacatgaaaacaaaaacttatagatgacataagctttcaaaaatactcataaacattcttcttaagatgactttgtctttcaggatgcctgtagagttttttatttttctaattatggaaacgtaccctcattccagaaaacaaatagtgtaacatagcttcttcaaaaacatataaaaaataaaaaatttaaaaaaaactttgtaaaacaggaaagcataagaaaaaaaaattaaatcaatttttattccaccacctggagataaccactgtcaaggttttggagtgtatctgccatgattcctgcctaggtcctctgtgtttgccattccctctccctgggacactcttccctccgcagcttgcctggctcactcacttgctgcattctggtctctgcccagctctcaccagaccagaggggcctccctgaccaccctcataaagtagtagcaccattactctctattctcttactctgctttatttttcttcaaagccaattaacaatgtgtggtattatgtaatatcacataatagatatgttacttaattatctgtctcactcaacggattgtaaatgtaaagatatatgtatgttggccaggtacagtggctcacgcctgtaatcccggcactttgggaggccgaggcaggtggatcacctgaggtcaggagttccagaccagcctggccaacatggagaaaccccatctctgctaaaaatacaaaattagctgggtgtggtggtgcatgcctgtaatcccagttactagggaggctgaggcaggaggatcacttgaatctgggaggcagaggttgcagtgagccaagatcacgccactgcactccagcctgggagacagtgagactccatctcaaaagaaaaaaacaagtatgtatataaacaaatgtacatatataaacacacatatatacacgtacatatctcctagaacattctctctcagtagtaacagttgcttgcttaatatatattgcatttattcttttatcattttgagtttctattatatagattcttttttctttgcatatataaacttagaaataggatcatcccagacatattgtacagactgtgttttttacttagcagtaaattatcaagatacactggaaattcttacccagtgagattttaataatggcataaaggatgttaaaaattccctattgttagaccggtacatgggcattttgatacatccaccagatacatatcatgttagcatcaaccagttaagaaagttaatattaataacacatattcatatggtactttataaagtattttcatatcttgtttgatcctacaataaactcaagtaaacagagcagaaactcaggttaaataatttccttgaaataatataactagtggtagggagtccagactcaaaggtaggtctacctgtctcttcaccatacctcatagtccctggttgaagccttcattttatagataagtgatccatgcttagagaagggggaagtgatgtgaccacagtcacatggcttcttcaagaaagaacagagataagaacccaagactcctgactccctgtccatagctcttgcaactactccgtctctccactgcatgctggctcaataaattagaataaaattcgtaacttgctgcacagttaaaatggcgaccgatgcatgctgttatccttctctgaagattactcagtatatttgcttggtgctgcaaagtgccaacctgatgacacttgcaatcctgagcttatttgatgtggttgggaagcaaatgagattccagtgcccctgttgcgcataggtgctcaatgagcatttcctgcatggtggggaagtgccctatatttgcagtatttgatccagtttaacagcaagatcccgtgataaaattagccttgtaaaagttttcaccctagttcacacaaaaataagattctgtgattatgactagcaatttttcatgagttgatttatctgaagaaaacctaaaaggttttgaaccattaagcattcgatttaggaaaaaacaaaaacaaaaaaaacttcgtgtacagaagaataaactgagaaatgaaacagacttgtttcttgtaataattatgagcaatatctgaaactcagcatccttagaccattgagctgtgtaggatgaatgtgctaattaatcaattactacccaacaatgtaccctgtttatttactgaaatgcaccagaaacgtgcacagaactggtaattattaatcatcttcagtaacaaatatgactcaagttcaccttcatataattaatagagcacgtagttagctttaacatcttgctttattaggaataacgatgagaaataaaaaaagaagctgaaccccaagttgtggttcacggagatgctggcttggactaatgtgcatattatccatagcagcagcattactcatacccaccccaattgcagccagatgctctctaagttaaaacctaacttttaaaaactaaacatttttgtttgaataaaattttaggcttatagaaaagttgtaaaaacagtccaaagaatccacatatacgctttcctcaggttccccaaatcaaacccaagttttagagtgtgataatttacttacatttgggacctttgttgggggtgtccaaacttattagcacatggctttccattttaaagataatctaaaagtacttttcaatatacatagaaatagttgttttacatcaatttttaaaagtaatctagttttgaaagtcactcttttgaccgggtgcagtgcctcacgcctgtaatctcagcactttgggagccccaggcgggtggatcacctcaggtaaggagtttgagaccagcctgaccaacatggtgaaaccccatctctactaaaaatatgtaaaaatacataaattagctgagtgtggtggcacatgcctgtaatcatctactccagaggctgacacaggagaactgcttgaacctgggaggtggaggttacagtgagccgaaattgtgccattgcactccagcctggacaagagcgaaactccatctcaaaaaaaaaaaaaaaaaaaaaaaaaaaaagtcattctttttgagtcatcatgcatgcccccaaatttcctttcagccagacagatttctggttaagagggttgtattttgggtctagaatgctatttcctgagtctttgtgttcaaagcatgggtttttgagtccagctcttacaggttcaaatcccagctccaccacctgcctgctttgtgactgtgaataaccacatcaccctctccgacctctgacatttcatttcctcagcctgaaaatgaagaaaatgaaactttgctttgagtgttgtttaaatgagacagtagctataaagcacctagaataacataaacacccagaaactggtagatatcattacatggagattaataccctctgtagctactttttgcttaagaaactgaaatgtgcacacacaaagtggtatttcacacaatggaagctgcaaaggcaggttaacgtttttgaaagttttctcctgaaagaaaaaattagagaaagtctagtgttattgtgcagtaaattaaaaacctccaccatctgaaaataccagtggaacttcacttcaaaaacctaa

SEQ ID NO: 2290 - DNA, 3675 bp, Homo sapiens
cgcgcgcggtgttgccatggggacgagcggctccggctgaaggtttccgtgcttggaaaccgcgcctccgcggaggtagccgttccctgacctagccatggcacagaacactgaaaaccacgaccctgtcggatccatcttaatccagatccatgaagacctttatcagttaaaggagaaattaacaaaattctcacctgaggaaaaaggagagactctagacattcagagtcttgaaacagcaatcaaaaggactgaagtggggttaagaggattttaagtatgatagaacgagggctgattccaccaacagcaaggattacctttcagaatccacccattacacccagagcagctcctctgcatagttttgatgaagcacgtaagattccaactgtagccactttcactatacctcgggaaccacctccatctccagcagaagtgaagttctttcccaagaaacaaagatcaaaggggaaaagcagaaggtcaagaggacatcatgataggaagatttgtgatcctaatccacctgggacagccccagatatgttcctaagaagaaaccagacttaagaataaaagaacacgtgtcaagagaaacctaagaatgacaaaggccatgaaagtcaaaacacctttgagagccctgaaatcactgtgggattatgactttttaatttatgatggtgtcatagacaatacagccccagacttcttagcattcaaggaacattttagcttagcttggggaggtattttttctctcttggaacacgtcgagaagtttctcaggaactatgctataccagaagtcaaaataaaagggaataatttggtggccctccttccagagtttgagctgacgaataaacttaccagatatgaccttctctcagtgttagaggacccagctcatgtccaaatgctgataaatcttccagggcaaaggtacaagggccaagatggaaattcggaggccgccatgaagatccaagccacatggaaatgctacaaagcaagaaaattcttcctcttttatcgccagcagaagtgggcatcaggtgtgattgccattgcttggctgttatattgccataagactcgactaaagaagatactaaaggaatcacgtcagagacacctggagaattttcgcattcgagccaagcatctggcagccaactggaatcgcatcaggacctccaggaggactattatccatatcccatcattagggtattcccagcctgtgagagaacatattgccgatttcaacacacagcagaacatgcagctggggaggctgtgtgacatcttagatgccaatgtgaatgtcatctacatctgctcccatcatatgaatgacgagttagtgctgtattacaaaaaaatcctaagtctacatgcagccgtcaaatctgggaaccttgaggacagaagtgacctgcaggacaggttcaaaattatcacacctgaagctgtaaacatcttccctatgatagagcagctgagtcagctgataactgatcacctgcaaatacagcgctggctctttaaaatggactctgagttccgaggaaatgggactgcattttgtgatattccttcctacctaaagtgctacaaatgggtgctaaaggagagtagcagatatggccttgaagactggagaaagaaatgggcacaagagccagctttggtgaagatctctgaggagctggcgggcattttagcacagcacgcacagccagtcaatgagaaacggttcccgacgtggaggaaattcctccaaacatttctcagtcaagggggtgtgatcgaagcattcccacctgcagacaatgtcaccaacctcacagtggacatgctgatagagcccaacgggaaaatcagcgtgctgtcgacaggggaccagcttcatgctgaaagccccttcatctcctctggtaccaccgtgcctcagacctcagtggatccccaagttctcacttatttgtgcctccaaattggaaaagcctgcagaatgagagatgtggttggttacttttcgatagatctggtgacttttatagatccaagcaccttggaacaacaggtgtgggcaaccggccttaacctcgcatatagtgaccagctggccctgactcaactcaccttatacctgacaaacggccatctggattgcagtttgagcaccctggaagtgccccgctttgttccaaaggaaaggaagaaaaccaaatgcatgagtgcgctgtcaatgccgatgctggcaaccagtcgctatgcagtgatgaccacccagctaagacacagcaatctctcactggttttccactatgtttttctccagatctgtagggcccatggcattggctatgatcttgagaacaatcggcgaggatctccagggggtcctcatgacctttgctcgccatctcttcatcatccatcaagaaatatcagcacctaatatgcaaggcgagaccaattttaagaccaccattgctgatattgaaactattctaagagtaacaaaggaaaacaaaatgagatttgaagaggagcaacagtccaaagatgataaaaacctctctaaacccaagaaatgatcctggaatacagtacataacaatttggatcccagtctggaataaaaagggcaatttttttttctgttagaaataaaagccaggggaaattggtttgctttgtgtgctaggaggtgaatcagaacagattataatgaaatgctctttttaaaacattgtttattaagtgatcttattttatttattaaaccaaaacttatttgtgttttcatttgagagtgttgaacaatcccttcttcttctcaaactcagaaaaaagtaatctgataaaagaagaaagttaaaagtcttactgatatcacctccgcatttacttcctcataggcctcaggattatgtagcttttattttttatgttttataaagttttctcctatttctaatagtccatcgatcttctgcatttataggtttgaataaaggcttaagaattgctatttgtcaaaacacaaatgcctttttttcaaagcttcaaattatattgaaattatatttatatgaatttttaagtgactatcattcatcgtgtttttgttataccaagccactattgtctgctattgttgccatttttcaaaaagtaggataagccagcatctagttaaccaaagcatcagaatgtatctaggtggcagtatctgctcttagtttaagatggagtgtagctcgagctctgtagcttgaataaacatttgtattctctagttctccatttaatacagcagtaggattttttcaagtttagttcaacattatactacctttaaaaaggcagactgttaagattgtagtagtgctgactctaactttcagcattcacttcataattgtccaaaaatatttccacatcagtgagctttactgaagggtgaaataaaagcaaattacaacaccaaaaccattattgttttaaagaatgacctttatgtctataaaaatattttagtgtattggggaaaggaataggatttttacctgtggaatttcaataatttgttaactgtgattcagccacaggctaagagtttctgtaataaaattaacatttgtgtgtgtc

SEQ ID NO: 2291 - protein, 617 aa, Homo sapiens
MTKAMKVKTPLRALKSLWDYDFLIYDGVIDNTAPDFLAFKEHFSLAWGGIFSLLEHVEKFLRNYAIPEVKIKGNNLVLPEFELTNKLTRYDLLSVLEDPAHVQMLINLPGQRYKGQDGNSEAAMKIQATWKCYKARKFFLFYRQQKWASGVIAIAWLLYCHKTRLKKILKESRQRHLENFRIRAKHLAANWNRIRTSRRTIIHIPSLGYSQPVREHIADFNTQQNMQLGRLCDILDANVNVIYICSHHMNDELVLYYKKILSLHAAVKSGNLEDRSDLQDRFKIITPEAVNIFPMIEQLSQLITDHLQIQRWLFKMDSEFRGNGTAFCDIPSYLKCYKWVLKESSRYGLEDWRKKWAQEPALVKISEELAGILAQHAQPVNEKRFPTWRKFLQTFLSQGGVIEAFPPADNVTNLTVDMLIEPNGKISVLSTGDQLHAESPFISSGTTVPQTSVDPQVLTYLCLQIGKACRMRDVVGYFSIDLVTFIDPSTLEQQVWATQLAYSDQLALTQLTLYLTNGHLDCSLSTLEVPRFVPKERKKTKCMSALSMPMLATSRYAVMTTQLRHSNLSLVFHYVFLQICRAHGIGYDLENNRRGSPGGPHDLCSPSLHHPSRNIST

SEQ ID NO: 2292 - DNA, 3561 bp, Homo sapiens
cgcgcgcggtgttgccatggggacgagcggctccggctgaaggtttccgtgcttggaaaccgcgcctccgcggaggtagccgttccctgacctagccatggcacagaacactgaaaaccacgaccctgtcggatccatcttaatccagatccatgaagacctttatcagttaaaggagaaattaacaaaattctcacctgaggaaaaaggagagactctagacattcagagtcttgaaacagcaatcaaaaggactgaagtggggttaagaattcacattgagaagtatttaaatgttgtaaaccagaatgtattaacgacttctgttaatgatgagagcttatatactccccaggcttccaaatggttacttccaactgtaattgatcagaaatcatttattttccctcaggaatctgagggtacattttggcaaccccaaagacagcacagttcatctctgcctgtctttccaagagcaaagataaaggtttcgaagttaatcaaagggtctaacatatccagcctcacggttctgccatcttctcattgcacagatccctatttcactcctataccagtcttacaagcagatgcccacaaagggattttaagtatgatagaacgagggctgattccaccaacagcaaggattacctttcagaatccacccattacacccagagcagctcctctgcatagttttgatgaagcacgtaagattccaactgtagccactttcactatacctcgggaaccacctccatctccagcagaagtgaagttctttcccaagaaacaaagatcaaaggggaaaagcagaaggtcaagaggacatcatgataggaaggccatgaaagtcaaaacacctttgagagccctgaaatcactgtgggattatgactttttaatttatgatggtgtcatagacaatacagccccagacttcttagcattcaaggaacattttagcttagcttggggaggtattttttctctcttggaacacgtcgagaagtttctcaggaactatgctataccagaagtcaaaataaaagggaataatttggtggccctccttccagagtttgagctgacgaataaacttaccagatatgaccttctctcagtgttagaggacccagctcatgtccaaatgctgataaatcttccagggcaaaggtacaagggccaagatggaaattcggaggccgccatgaagatccaagccacatggaaatgctacaaagcaagaaaattcttcctcttttatcgccagcagaagtgggcatcaggtgtgattgccattgcttggctgttatattgccataagactcgactaaagaagatactaaaggaatcacgtcagagacacctggagaattttcgcattcgagccaagcatctggcagccaactggaatcgcatcaggacctccaggaggactattatccatatcccatcattagggtattcccagcctgtgagagaacatattgccgatttcaacacacagcagaacatgcagctggggaggctgtgtgacatcttagatgccaatgtgaatgtcatctacatctgctcccatcatatgaatgacgagttagtgctgtattacaaaaaaatcctaagtctacatgcagccgtcaaatctgggaaccttgaggacagaagtgacctgcaggacaggttcaaaattatcacacctgaagctgtaaacatcttccctaagcatcatatgtgcctggccactcacctgatgtacagtcccaaggcaatcaaaagaataaaaaatctcatccgaggaacagaggcctacatcgtcagcgggctcctccacagagatgatttagctgtggccgatatgttagacatacccatcctgggctctgagcctgaactagctcatctttatagtaccaaatctggaggcaaacgtgtctttgacagtgccaatgtggcagttcctcctggaatatatgatatttatagtcagcaacagatgatagagcagctgagtcagctgataactgatcacctgcaaatacagcgctggctctttaaaatggactctgagttccgaggaaatgggactgcattttgtgatattccttcctacctaaagtgctacaaatgggtgctaaaggagagtagcagatatggccttgaagactggagaaagaaatgggcacaagagccagctttggtgaagatctctgaggagctggcgggcattttagcacagcacgcacagccagtcaatgagaaacggttcccgacgtggaggaaattcctccaaacatttctcagtcaagggggtgtgatcgaagcattcccacctgcagacaatgtcaccaacctcacagtggacatgctgatagagcccaacgggaaaatcagcgtgctgtcgacaggggaccagcttcatgctgaaagccccttcatctcctctggtaccaccgtgcctcagacctcagtggatccccaagttctcacttatttgtgcctccaaattggaaaagcctgcagaatgagagatgtggttggttacttttcgatagatctggtgacttttatagatccaagcaccttggaacaacaggtgtgggcaaccggccttaacctcgcatatagtgaccagctggccctgactcaactcaccttatacctgacaaacggccatctggattgcagtttgagcaccctggaagtgccccgctttgttccaaaggaaaggaagaaaaccaaatgcatgagtgcgctgtcaatgccgatgctggcaaccagtcgctatgcagtgatgaccacccagctaagacacagcaatctctcactggttttccactatgtttttctccagatctgtagggcccatggcattggctatgatcttgaggaaaggcaaggaactgtttttatattatatgagcacctgaagagacacaagttgggaatgttaacaatcggcgaggatctccagggggtcctcatgacctttgctcgccatctcttcatcatccatcaagaaatatcagcacctaatatgcaaggcgagaccaattttaagaccaccattgctgatattgaaactattctaagagtaacaaaggaaaacaaaatgagatttgaagaggagcaacagtccaaagatgataaaaacctctctaaacccaagaaatgatcctggaatacaatctctctaatccattcgaggggcccattgttcagacacttgacagataggaagtcctacatgcccattagagccgcgcctcgactgaagccagagcaacataaggtccaagagactcattagttcactggcacaatcgtgtcctgagagtaaatgaaaccctctgtctccttatggctctcatctgctctggactttaaaagaaaactgtctccgttttgttcggcacagtagtggatcattcacatggtgagagcccctgcttaacagtacaaaactgttaaatctatcggaaagttttgcatgtgaattttgattagcactcccgaagctcaagctgctggcaatagcgaaacgatttcgccatc

SEQ ID NO: 2293 - protein, 1021 aa, Homo sapiens
MAQNTENHDPVGSILIQIHEDLYQLKEKLTKFSPEEKGETLDIQSLETAIKRTEVGLRIHIEKYLNVVNQNVLTTSVNDESLYTPQASKWLLPTVIDQKSFIFPQESEGTFWQPQRQHSSSLPVFPRAKIKVSKLIKGSNISSLTVLPSSHCTDPYFTPIPVLQADAHKGILSMIERGLIPPTARITFQNPPITPRAAPLHSFDEARKIPTVATFTIPREPPPSPAEVKFFPKKQRSKGKSRRSRGHHDRKAMKVKTPLRALKSLWDYDFLIYDGVIDNTAPDFLAFKEHFSLAWGGIFSLLEHVEKFLRNYAIPEVKIKGNNLVLPEFELTNKLTRYDLLSVLEDPAHVQMLINLPGQRYKGQDGNSEAAMKIQATWKCYKARKFFLFYRQQKWASGVIAIAWLLYCHKTRLKKILKESRQRHLENFRIRAKHLAANWNRIRTSRRTIIHIPSLGYSQPVREHIADFNTQQNMQLGRLCDILDANVNVIYICSHHMNDELVLYYKKILSLHAAVKSGNLEDRSDLQDRFKIITPEAVNIFPKHHMCLATHLMYSPKAIKRIKNLIRGTEAYIVSGLLHRDDLAVADMLDIPILGSEPELAHKTKSGGKRVFDSANVAVPPGIYDIYSQQQMIEQLSQLITDHLQIQRWLFKMDSEFRGNGTAFCDIPSYLKCYKWVLKESSRYGLEDWRKKWAQEPALVKISEELAGILAQHAQPVNEKRFPTWRKFLQTFLSQGGVIEAFPPADNVTNLTVDMLIEPNGKISVLSTGDQLHAESPFISSGTTVPQTSVDPQVLTYLCLQIGKACRMRDVVGYFSIDLVTFIDPSTLEQQVWATQLAYSDQLALTQLTLYLTNGHLDCSLSTLEVPRFVPKERKKTKCMSALSMPMLATSRYAVMTTQLRHSNLSLVFHYVFLQICRAHGIGYDLEERQGTVFILYEHLKRHKLGMLTIGEDLQGVLMTFARHLFIIHQEISAPNMQGETNFKTTIADIETILRVTKENKMRFEEEQQSKDDKNLSKPKK

SEQ ID NO: 2294 - DNA, 128775 bp, Mus musculus
  misc_feature (1)...(128775): n = A, C, G or T/U
ggaatgggctgattccataactttttggaaggccatgtggcaatgtcataaaaagctgtaattctcctaggtcttactcaaagtaaataataaagaatatgaactaatgtacatacacagacatgttagaggatcacttttgtgacatgaaatgaaagtggaagccatagctgggcagtggtggtgcatacctctaatccaagcacttgggaggcagaggcaggcagatttctgagttcgaggccagcctggtctacagagtgagttccaggacagccagggctacatagagaaaccctctctcaaaaacaaacaaaacaaaaaagtggaagccatcacaggaagtgagtttgataaatcacggttgagacacatgacaacatgctagtagacacacatgacagcatgctagtagacatacatgacagtatgctagtagacacacatgacaacatgatctacactcggggcactgtcagatgctaatatttatgagcatatggagacattcacagtgtttaacaagaaggcaagtggctgcagtgtgactctttcctgtgtgctgaccattgtttggactgtggtcaaggatgagggctgcccagcagactgcctgggtggccagagtatggccactcacagacgccctgctgttggcctctctgccctcttctgagaaggattgatcatggcatgggccatgggtagttatgagaactcaacagagccacccatccagttgaagcagggcctagtgcttggccactctcagtatgggcccagcctgcgctacttaaacagaaactcatagtgagatacaatccggtcctaccagactcccagcgttgtaacaatttagtttatttattgctttttcgttgtttgtttttgtcttgtctttttgttttgtttccttagtgggagttttgagacaaggtttctttgtagccctgtcttcctggaacttgctttgcagaccaggctggccttgaactttaacatctgcctgcctctgtctcctaagtacttattgcctctgtctcctaagtacttatttttcttaaatttttttaaaaatagattttcttttagatttatttatttagtgtgtatgtatgagtggtctgtgcacatgtgtccatgtgtaccacatctgtgcctggtaccctctgagctcagaagaaggaatcaggtctcctagaactggccttctggatggttgtgactcaccatgtacgtagatgctagggcttgaacataggtcctctgcaagaacaagttctcttacctgatgggtcctttcccagacctcactttattgtaaactgtgtgcatgtgtgtctatgtctatgcttatgtatgtgaggagagcagagggagagcgttataggtaatcgtgagctgcttgacacaggagctgggaaccaagcttgggtcctctggaaaatcagaactcacattcctaactgcagagtcctacatgtcacctattttaaaacaggcaattgaggtgtgctcagtgtattcagagttaaacaaccacagaagccagtgttaaattctgcataacctttatttattctttgtcatatttacacacaatgtattttgatcatctctattccacccccccccccagtcccctaggtacagcctgagcacgcccctttcccaccttagagtcctctcctttgtttttgtagcccagagtccaataagtcccacctgctggaatactgaccagaccagtggtgttagcctgactttgtgcagatcttgtgccaagatccataggtatctgtcttagttaggggttttactgttgtgaacagacaccatgggcaacgcaactcttttttcttttcttttttttttaaataatttatttatttttatttcatgtgcactggtatttagcctgtatttctgcctgttggtgaagggtgtcagatcccctggaactagagttatagacagttgtgaactgccatgtgggtgctggaaattgaacctgggtcttcaggaagaacagccagtgctcttaaccactgagccacctctccagcccacctccaccccaaggcaactctttttgttttgttttgggtttttgtttgttttttgttttgttgttggtttttgagacagggtttctctgtgtagccctgactgtcctggaactcactctgtagaccaggctggcctcaaactcagaaatccacctgcctctgcctcgaaagtcctgagatcaaaggcttgcaccaccactgcctggcctaaggcaactcttagaaggacaacatttaattggggctggcttacaggttcagaggttcagtccattttcatcacagtgggagcatgggagcatccaggcaggcatggtacaggtggagctgagagttctacatcttcatctgaaggcagccaggagaagactgacttccaggcagctaggataagggtcttaaagtcacttctcccaacaagaccacacccactccaacaaggctacacacctctaaatagtgccattccctgggccaagcatattcaaaccaccacagtatccatcactgcagtgagttcaacagccatgtcgtcttcagtaggctgcacttcacagcactccatcctccagttcctgagctcttgcagcatccctcctgagatgtccctgagcatggagggtgttgatacagacgcccctagtttaaggttgagctcccaaaagtcccttattgttattattctcagtatgttgcccaggtgtgagtcaacactaactgtagcctggtggccagatttcgaacattcaggtgtcactccctagcccctcccctagcccttgacaactagtctttctgtttcaaagatgctcttctcccagaccttcctagtggtgggatcgcttagactgtggcctcctgagactatttttttatatatatatgtaagaatagttttcaaggctacagcacaggcagaacttggtttcatttcatttttttacaacagagagcctttatgagcagaaagtcatagtgaaatttaaaatcatctctctatgatgaaggtggtctgtttttgcaataaccaccagacatatttacctttaagctaccccacccccaccccacacagtaagattgagctctggcggtgagcagctttcccttgtctctctaaccttacgtcatcctctctaaatcagagccaggagttcccacaggctgcggatacagagtggtgagtgaggagaagattcttaatgcaggcaggatttgaagtcaggatttcattcttctcctgccacgtccagtgtctgaccatacaaaagctctatggccttctgcctcctcctccatagacattggggtctacttcctcactcagggtagatgcccctgcagtcaccccccccccacacacaatgtttcctttatgtctttaatcttcttttggtgtttcttttttattttgagacagtgtttcgttgtgttgttctggctgttgtggaattctctctgtagaccaagctggccttgaactcacagagatctgcttgcctctgcctcccgagtgctgggattaaaggtgtgtgccactatcgcttgggtaaaatttatttttattcagggatttttttttttttaaacagcatcctgtgttcagtttggaatttcctttttctttttcaacatagaacgcatgaggtcagcctgggatacatgagaccttcctcagaaaagaactttctgtggcatgaaatgcatttacattgttttgtttcctactaccattcttatcaaactctatttatttgctgtgtgtgtgtgtgtgtgtgtgtgtgtgtgtgtgtacatgtgtgtcaccgtgcatgggtagaggtcagaggacaacttttgggtgttggttctctcattccagtgtgtgggtcctgagaacctaactcaggttggtaagcttgctggcaagcatctttacttgctgagccatcttgctggtccaccattcatttctggaactttctttatcctatagaacccttggcccattagacactaacccccagcatgcctgcaaactgtggtaattttccatctctctgacttcactacctgatgtatcctatcgatgcaggatcagatgtttgtctcctgtgactgactggcttactgaacttaagaagttctcaaggtacacagaagccatagcctgtgttggactttccttccttaaggtggaacaacattctattgtacgtctgcacactgcattctgcttatccatcgtctgctcgtggcacttggatgccttccaccttttggctattgtaaatgatgctatgaacatgggtgtgtaaatatttgctcaagaccctgacttcagttcctttgatgatacacatctagtgactttaatggaagaataacaagatgttaataaggtaatttgaaggcatacaatcttgccacttttggagaaagtttcatttgaatgcacctctctggtggttagacacacatctgtctttaaaaaaaataaaataaaataaagcaacgataagtaggccaggttttctgacctctactttttgggtccatgtgataagctggaacaggagcagaggccatgatagtgactaattatcccaggaagaggaaagggaaaactcagtgacctctgtgaagatatgtgcatttgtacaggataaatataaacacaacggccatgtgaatacagggagaaaactcacagagcgtgtatccatttcatgaaaacaggtagggctgagttctgaaaaaaataaaccatgaacaggaaggaccccagagatctcaggtcttcaattccttaaacaggagggagatagtgtaagaaaactcaatatagtttcatggataggacctgggctccactcactgatccacaggactcacttgaccgttgcagccttggccctgctcccgggtcccctcaggactttccctggacagagccacactggttccttctgtcagagccttgatcttccaggggcactccaagatcaacactagagatcccaatgagagctgtggtgacagagggacccagcctggactggcagtcaatatccagtctagtttaggccaggagtggctcagtttgcggggtctctggtttgtcttttatgaaacagtgataacaacggagactatgatttagttttatttttatgctttttggagacagggtctcatgtagcccaggttgccctggaacattccctgtggtagccaaagattgtctgttcctcttgccttcaacagccctaatgttggcattataggcatgagtgaccatgcacacttttttggggtgtggaacccagggcttgatgcatgttaaacaagcgctctaccatctgagctacatccccagtccataactatgggaaccttaaatatgacctcatccttgaaatctgaaaggctcatacagagcagacctggtccctggctgtgcttacaaagatgccatgggacccccaccccccatgcaaacatccttggggaggcatttagacaagcatttaatatcattttcattgtgttcaccttatatgagagatcttgatcccagaactaggtggggctgaaaggcataggcactgtcttttgagcaagccataaaaaattagcatttttactgatgctatatgcagaacataacaccttaaccttgccaagactgtccaaagaatttggctaaccacagtcttcctaacacaagacaatgatcagtacagatcccggaaattattctttctgttcagctttaattttcctttccatttaattgccctccagcatctatctattctactgtgtccagtatgttttttagacatatctattttaagtgttttatttttatgagtgttttgccctgcctctaagtgcactacatatatgcagtgcctacagaggccagaagagggcactgcatctcctgaggctggagttaacagttgtgagctgctatatgggtgctagaaacaggagtagggtcccctgtaagagcagcctgtgctcttagctgttgagccatcttgccagccccctttacccattttaagtgtacagttccgggcattgcctacgcttatgctgctgaagaaccctcgccatagtccaccttcagaaatcttcctgttccaaagctccatgcccagtaagtaactcacagcacttcctgttcctttccctccgctcccggcaagcaccacctgctttctgtctctacaaacgtgaatcacacggtgttagtcattttgtgattagcttattgcacttggcatagagtttgccaggcttatctgcgtcacagcaaaaaatcattcttttaaaagctgaataatattccactgtgcagacagtcctcactctgtctctcagggtcattggtggggtttccagctttgggtattgtgaaataatgttgctatgaatattggtgtgcaaatactatctttggactcctgctttcattgagtgtatgtgtgtatggccaggagcagaattgttgggccccatgataattctatgttttattgttttgggtaattattatattattatgctgttctccccaagccaacactgttttacactcttggtggcagtgtacacgtggcccaatcccttcctagtctaactggcatacaagaccaaacagcccaacaggtgtgcagtattttgctgtgtgttatctttatcttttacatacatagcatcgtattagtaatttattgatttttacttggaacagtggctttatataaaatgaaaactacatttacttatttgtgcatggactttcatttacgggaggcagatgtgtgccacagcctgcccgtggaggtcagagggcaacttctagaagttggttctcggctggacatggcactccatgttgaacccaggtttctttgggtatggcctacaaaaacctgctagacaaaacctgcagacagactgtctcctgcaggagggcctctgccgatgatcccagccctgcttgcccacctgctttcaccaggcgtcacccttctgcgtgagatgtagggaaaaccctctccacgctttctcgattcaccacctgttgattacctatcttcactgtggccaggtgttcctgtccctttctttgcacgatcccccctcccccccaagaaccccatcatacacactttagcatgtgggtgtcttaggctctgacctgactgtgttctctattcctagggagacatggctgtctccacccacgatcctgcctctcctgaactttgcacccaccaggatgaaaaattaactggactaatgtttccctcccaaggacaagggcaaaggctgcagggcaggtctggctgggtcctaggcaatcaggtgccagctgaagttctaaccaatcctgaaccacacacctactcactgaccaaggtagaggggtctattcctcccccatgggaaactggttttgtgcccccaaaacattctcagactcaggaaaaagatggaggttagaaatgacacttgtttgtttttgtatgccagcggttttatttatttatttaatttttttttttttaagacacaaggctggccttgaactcaggaatccacctgcctctgccccccaagtgctgggattaaaggcatgtgccaccactgctcggctaagattaacttcttactggaagatgattacataggccgctttctgtcctctgccctcctaagcaaaccttcatccctatcccttggtgcttctctggctgggagctcctagtggttaaggaccttcctcgttcattgtgaatttctcaacaagtagcatatttgtgacaggaagcgctggagagagagaagcaggatttgaaccagctctcctggctacccttcttcatgaatcaacactggcctccactttttgtcttgcttaggacttctgcaaagtcccagcagcctaggaggtggcgaggaaagggcctgagaccattcctggagataatggtgcacctgtgagaaaagctcttgttttgcacattgtgtcctagctttacagttctagggccagtagcaagaaccaaaaccaaacaaaaacctgggtttaaatcctggctctgacccttggtgctgtgcctctcaggcttttaacggcagtgattggtatctgtttgaacacagcagtgaagactgcccacctttaatgccaagtaaggcacaggcaggcagatctctgttcgaggccagctttgctctggtctatagagcgagttttaggacagtcagagctacacagagaaaccctgtcttgaaacaaaacaaaaaggacctccttccttatagtctctagcagcaagtggaagggaggctgcagccaccatctaactggtttgcaggaaccggcttgctgaggtctactgagcctcaggggtcttcctttcaggacttaccagggaggtggaaggagggaaaccacaacccctgacaagctgccgctggcggttggtggtggggcagcctcgaggacagagcagggggcccctgaagcttcagggctgactctgtgggacgagccacacttcatagggcttcgtaaagcgcaccggatcttggtttgcaaataacttgtttctcaccacgggagagaaataggtgtgtgtgtgttcgcgcgtgcgcaaaaccaagcacactctaagcatctgggctagcctgatagggaggctgaaacaggataaaggagcagagggtctaatgtaacgccccaaatccgtggagggaccgtgggcaaccagccctgaattcgtctagtctgcagtaaagcccctagggctactcaaagtcaggttctcttggcttcccacctaggctaactttgaataaacttctcgagtcctctccggcttgctctttgtgtgtgcgagttcattgctttgtaaacaaaagctctcttacttgtttggtgtcgaatttcggaacttcagtaacaccctgaaatgttaattctctcccctcctccaaagaaaaatcctaaagcacccccattcattccttcaggaacgcaacagatgtctttgaggcccgttttctgcaaaaagcttggttcactgggcccaagggacccctggctccagctattgttcaagttgtcactgaggtctcttaactccttttaagtctccctctccccttttccaactccctcctccgcagtctcaggcagtcggccgttctgatctcacccagcaggaaaacaaaaacaaaacaaaaaaccacctaaagcagctctggccactgagcgagatcagcgtgccccaacttcctgggcccggagcttttctgaacccctcaccgcgcccgagtcctctccggagtgcagccagcccttgacggacagtgcctgttccctgtgagtctaatcctctctagttcctgcaacggtatctgagagtctgtggggcggcgagtccccaggagtccggtccctcggcacttggcagagctggcggccgccctacccggtggcccacgtgggcgcgcttggcggcgctgggcggggaaggccgcgggtcctccccggagcagggcgcgggggaggagcggggagccccggcagcgagggggcggcgactgcgctgggaaggaggctgcacgcggagctgcgtgaaacgtagacttgggagcgggcgggagaggagcgggtagcgcggctgctcggccctggctggccctgcaaggcggcgatcgcagaggaggaggaggaggaggaggaggaggagcagcgctgcagaggcggagggatctgcgcaccaaagccatccaggccagcaaagtttggctgggggttggactttccttcccggtagcggcacccaaacagctaccccgtgcggaaacccaaactttctactgccacttggagtctcgcggccgtcgcctccgccccgcgcgtccggggcctgcccgtcagtccgtcggtccgcgtggagcagctcgggcgccgccgtgctcccgatccccgcagctgcagcgccgcagtcctggcccggacgcccgggcaagttctccagagttaaaagcgaagttcgggcgaggcgcgggccgagctgcctctgagcgcccccggcgtccccagtgcgcccagccccgccgggggcgccggtgacccttcggtgccagccatgtcgtccatcctgcccttcacccccccgatcgtgaagcgcctgctgggttggaagaagggcgagcagaacgggcaggaggagaagtggtgcgagaaggcggtcaagagcttggtgaagaagctcaagaagacggggcagttggacgagctggagaaggccatcaccacgcagaacgtgaacaccaagtgcattaccatccccaggtggggtcccagagcggcggggggcgcaccggcccagccccctagcgcggcccgggtggagagggagggcgtgtgcgcgtgtgtgcgcgcgcctgtaggggacggggagtgggtggagggaccccaaacaaaaccttcggatttgcctagcctcagagacctggcttccgtgcagcattttggcttctagacctcaagggtcgccagctgcttccgggcagcaggggtgtttctgagcttggccccccaactctcggggcttcgggctccaagtggaggccccgctttgttcggctctgccggccgagcccctcctcctccgccgcctcccgccccgcgctcgtggaggtggtggcgtgtgtccctttcttttcttcagctctgttcccccacttcttttcctcgtctacaggaatgcagtcggtacagctgtgggtgaggagcgggagcccgttgattgacagattccttcttcgctctttctttgctttgggattagcatttttactgagtatttttagatttggttgtgccagcctcccgccccctgtgcacgcatgcacgcacgcacttagttggagagcagagcaccgactttgaagcgggagaaacaagtggcagaaagtaggggctttccctctttccaccccacccctgctgatttgcgatctttttaatccagagtatgcgggtgcctagaatggagcaggcagctccaggcagataacaaaacaccccagggctggcctcccatcggccctgcattcctgtagagcctattttcccaaagcgctttgccatctgtcctgacctcctttatccttcccatcgggctagaggagtccggcgggagctcacagatggctgatggaaggggtcagtgacttcactcccaaggccttctagagcatacccgcgtctgggcaatgcggtgagagcactttagtcttctggttttgtttcttctcaaacacctttaaagactgattccagatgaggggcaggtggggatgtttgggggggggcgggggcgttctgcctgcagagggatggaaagaaggcctacgatagtagaggtcatcacctgtctaggcaggggtagcttccatccttggccacctgctcaaggcagctgtgtatgggctgccagccctgatagtaagacacaaaacaacatctgtccacaggaacccagggtcggccttccctagaagcacacaccacatatggtgggaatgacacttaaagaaaacagaaacaaaacacaacaaaagcaaaaatctaacaacccccaaacctgagtgggtggattccacctgtaaaggagagggcaggcaggcagtatgtggtctggaagaacgcttggctgctgagcctttgccagctggcgttaggggtgatgtgatagtcagaggcacctgggtttcannnnnnnnnnnnnnnnnnnnaatgacgaaatcaatgaaaaatgtgaaaaatgagaaatgcacagtgtaggacctggactatggcgagaaaactgaaaatcacggaaaatgagaaatacacactttaggacatgaaatatggcgaggatgactgaaaaaggtggaaaatttagaaatgtccactgtaggacatggaatatggcaagaaaactgaaaatcatggaaaatgagaaacatccacttgacgacttgaaaaatgacgaaatcactgaaaaacgtgaaaaatgagaaatgcacagtgtaggacctagaacatggtgagaaaactgaaaatcacggaaaatgagaaatacacactttaggacgtgaaatggggtcggccttccctagaagcacacaccacatatggtgggaatgacacttaaagaaaacagaaacaaaacacaacaaaagcaaaaatctaacaacccccaaacctgagtgggtggattccacctgtaaaggagagggcaggcaggcagtatgtggtctggaagaacgcttggctgctgagcctttgccagctggcgttagggggtgatgtgatagtcagaggcacctgggtttttggcttcttctccagctttccaatctcctctatccttttgctgaagcgggcggttgagtttcacagagctctgtcaggtctggagaagcagcctccccccaccccccacccccatctgcccgagtgcacccagctcaagtgctttctgttttgaaccctcctccagtgctatcaagtatgaaatagctgtgcaaagtatttcacaatttacaaggcactttcatatggtcgacgacagaactggaacatagaaaaggcacggaggtctaaaatgatcttgcttgcaaagcaacagaacttaagagagggaaagcattcattcgactagatctggcatgccctttctcccagtctgttttgaactccgagtccccaaagcatccgtgtccagggtgggtggtggatctcttctgtctgcaacgctcttggttaatctttgggctggggtcagcttggaggagaggctgtgccttcctcacaggcaggtcaaagctagtgtgcttctgagatttcaggctaacacttttgctcccagccgagtaggactaggtaccttcagcctgtgcgtagacctcgggctttggaagcagggtgtgtgtttgccggttctttggcagcactgcggactgaacccagggcttcctgcatgttgggccaacgctctgctactgagctaccctcccagtcctgggattgttttctttcatcttttctcaactagagagacccggttgcttgggtggatccagacaaaggtggatttccatccctggattttgtgcccacgcctctgggtcaccctgtctcccttggcaacagctgctgctgttttggccatgggcagaaagctaaaggccacgtcttggggaggcgactagttggctatgtgctcgtgctagccctgtgtctgctaagcccctatgtgctcgtgctagccctgtgtctgctaagccccgggcttgtgtgttgcttgtcacattgctgcctttgagaactagggctttggaaagcagacaaaggaaagtgtgtgacttagtcacccgcttcgagtggggcgggacactgggtgcctcagtacattctgtcagatctggagccgggctgtgaggactctccgtctgagatgtggaaccttttggctgtggtagctattggccacatgctggcttcttctttcccccgggctctaggcacattcagtgaccgggagagctggagtgccccaggcttgcttgccttcacagagatgaggtgtaggagtttcattttaagccacagagtggagagcagggcatctctgatctggcaggggtggggcagagctcaggcaagttccatgccagcagcccactcccacctgcttgagcggctgagaggagacacaggtgtctccctctctagttcctaaagggaagttgaagcacctgcctttgagagagacaggcctgccgcgggggagagccagtattggaccaagctgaaggcatctctggtttagaagggatcttgggcattgttgcatagcaccaaatccagagagggggaaaaaaaaatcaagaagtgaagtaggtcttacaggaagcaccccaccaccacctttgtccactccctttgtagtatgacctcctcctggggccaccagggactttgctaggctaccctcaactggtagggagaggaagagtatcttcattgtaacagctttctccagcttctggggacagaaacaccaaggcttttgacaatgccaggtaggtctctggccaaccccctcggtgtaaaccattggtagcaagcctcctcccagctgccagcatgcgagccatcagaacagggcctcagaacagcgggtagctgactagggcgctggaccacagggtcagtattctctggctggaggaactttgacccttcctgcttggtcctagggcagaatgtttgaatccatactttttgcgggcagcatttttgctctgtttctaatcagaaaacaggattgtttcttgtgtatccggcctctgacccaatgttatatgccctagggagggatgcagagatgtgtttgagaagacagggacatttttggagattggggatactgtggggaagatgactgtgatatatgttttaacatgtgaaggcacaacattagaatattaaaccatgacagccacctgctttctctggggaaagataaaccccacccaacccctagaattcaggtccctgcctggatttaaaatcggttgtattgtattaatgcatgtatgtgtgtatgtaatgtgtgcacgtatgtgtattgtgtgcatgatgtggtgcacatttggaaatcagaggacagcttgcaggcgatggttctgtccttccaccgtctgagttctgaaggtgacattcaggtcatcaggcttggtggcatcaggcttggtggcaggcacctttactggctgagtcatttcaccagcccagagccttcctggatgggcataaaactgggttaaaatgaggccccagaagagtttacagacatgctgcggagatgtagggtttttgtgttttgccttgcgtcctcattgctttgatggtgggacttaaccagtcactgctctcaaggaactcagcatccctgccccaggatagagagctggcagggtggccgagggtcgaacagtgctcccggtgggagctggcatgtgtgttggggaggttggtgtgtgctggatacctgttggggtgatggtctgaggagtttggactgtgtgaagctcctgggaacttggtctttcctttattattatttatgtgtgttcattgtgcaaactagattttatcatgccattttttgagtcttgtattttgagtatatgtacctcccttgggcccccaacccccatcttgaatcctgccctggcctctgtgtagtccctcttctagttttgtgtcttacaatttttttttaaaaaaaactgtagattcagtctatgtgaaaagtcacactacatctgtctcagtttgatttttgcttaacatggtgatctccattttccttgaaacatccctcgtgtgtgtgtgtgtgtgtgtgtgtttgtgtgtgtgtgtgtctgtgttgtttgagtgcgtgcttatatgtgtgttggaacctgaggagagctgtcttgcatgacacctttatctgctgggcttttgccaggcagacagctgcggtgactctcttacctgtcacttgtacagaagggcctgtgagctgagtgcttgtctaggacccaactataaagtgttttctctttgaagtaaagggcaacttagtgtgacaaacctgaatttcaggttttcctcggtgtgagcagggactcgagctgcggactgtgggttgctcagcctttccttttggtgcaacttagcttttcacatctctcaatcacatgctgggcagagaaaatcctgcgaaccccagtttctgaaaagacatgggaagtgttcctaggatctcttctagaagtctctgcaaggactttaaagagctttgcttatttatgtgcatatgtgtgtatgcatgcgagtgcagcgtccacaggcaccaggaggggtgtcacccccagacagagtgacagttgtgagcagacccacctgctgatggagcctgactcccatcttctgtaagagccacatgtgttctctatggcctagctatctttctagcctgtgaaatgttattttactttgtatttgcaagtgagggtgcatgcattctgaaagtcagttctctcctcccaccatgagctccaggcgttgaactcgggccgtcaggtatatggcaagagagtttacctgctgaggaccttgaagggcctggacataaacatttaaatgactattttaatgatagaaaaaaaagtgatgaatgaagtcatcgttcagttttgatgagacatgcaagaggttgatgacaatggagagaattaggtttgagcttatcacatcccgactctaattaaaatgagtttttgaaaaaaataaatattggcttaataatgtaaatttgcaattgctgctgtattataatggaaataaaattaacacaatttaatggactgaatggctattaatttccacctagtaatttattaggagattttaatgccatttgctgcgctgcacagccattattctcagtgtgcctctgtggaataaatgggactgggcagggctggctcatttgaaatgagactgtattctgttaaggcatttctcccggctcttcgtcttccagaatccccctcttaagagtcacacttccaaggtggaaagcaacagggtcttgaatatctagttaacttctgttcctgtctcctttgctgtacttgaagggtgtattaaccgcctttcttgttattgtgcaaacataccctgacaaatcagcggaaagggaggaaggacttaatttggcttgcagtttcaggtaacagtttattgtggcaggaaagccatagaagcaggagcttggagtggctggccacgtggcatccacagtcaggaagcagaaaggggtgaaagctgctgattggcccacagataagagtgggtcccatcaactcaatgaacccaaccgagagattcccttacagacatatccagagctttgttttcctggtgacttcaatttcatcaccttgacaatcaagatgaactatgacagctgggaaacacaaaaccacgaatacaacctgagccgggtgtgatggcgcacgcctttaatcccagcacttgggaggcagaggcaggcagatttctgagtttgaggccagcctggtctacagagtgagttccaggacagccagggctatacagagaaaccctatctcgaaaaaaacaaaaaccaaaaccaaccaaacaaaaaagaatacaacctgacttgttttcccaggtccgagtctgatagtgttgccagtggcaaggttgctcctggggtaggaggtaaggggcaggggcatcctgctgtgtgcgtggtgtgggaaggaactggaagctggtgagcattggagggaccagctttccaaggccttgtagttcagcctctccatcttccctgtgagggagtcagtggtttccttttaccaagtgggtccccaggaccacactgtagttgtcaggcttggtggcaaatgcctttgctctctgagcttgctctgcagtccaggaatgtggtttcagggacaaaggagtttctaggaggccttgtctagtttattgttctgtttgctttcagtgaagctgccaggtgctctctccgtgccctgggtgacagtgacgtgacgaggaaagagggctagctcctttgcttccctctgtagcttcccatctgccagctggttaaacatggctccttaggagccgtaagaccgttgtgtgcgtttatctccagctaatttgtaaatagaatttgcttggtgctaagaaaccagtccccctcaaaactctgaaatggattaactgctgacaaagattctctctctctctctctgtgtgtttgttgagagagagagagcgcgagcatacacattattctgtgttgacttacttcacagtgtgagaaataacgtatctgccggacaagcccctctgtcctcagtggcatgactgcaaacagctgcctgccacagtgacacactactactcacacacaatgttttgacagagagactcagtttaaattgaaaacacagtagaagccattaattaagaagtctggctaattctggacccagctaaaagtttgtttagcagactccagaaatgctatcaaagaaaactaacttactgcacttggtcaggttgttttggaagcaggcgtgactgacacagggtagtgagagtgtgtgtgtgtgtgtggtgaggggctctaaaccttgctttgtttttgacttaatttctctgcatctcagttgttctcagctggtatagtctaggtagcaagttctggtggagggttctccggactctgctttgatttttcatataggcattctagaagtttctgaagccatttaaaaattgtactgtctttgttgtgtgtgtatgtgtgtgtggggacacgagccacaggtgcagaagtggaggtcggaggatcacttgtcagctctcttccactgcgtggatccctggtagtcaggaactgggtcgtcaggctcggtgtcacgcaccaattacccactgagccatctcactagccccaatttagaagttctttttttggtgtacaactggttcattaattgaatcatgaatcttctttaattatcatcagtccagtgccaattaatttataaaagcgagtaaacaactttggagttccgtctttagattgtggctctcctcttccccttgccctcctggccccctggctacccttgactaaatcggcaaacttgaactacaaaggcgtgtagtgtaaaaatacccaacacgaggatgaagcccggagactgtgtgtcttcagaggcagtgagcggtttgccttcctttgttgctatttttgactattcttggagcaggaagttgactttaatgaccacagatgcctaaaaaacggtgagctaccagaggtgggcattctcgcagatacctgtgggagtgtttgctcctgtcagtgtttacccacgaagcttcctttatttattttcaactgtctatacaaagacagacactacccccagtaagcagagggagcagggagcttacaagtttgaaccccatctaggaaatggaaaacgagtttgagttcattctttttctgtgtcccaaggctttccccactcacatctggcaagttctctgtgctccactgggcgtttgtttagggcgagcactgtttagaaagcagcatacaggtttgccttggaaacagagttacccatctgactgctcctgccgccaggcttcgtactgagccaactgtggcccagaggggcccctggtgtgtgtgtgtgtgtggtgtttaaaagcttttgacaacttttgacaatagtaatgctttttgggtgtgtgttttttaaaggtctgttttgacactgttacagctcaaaaatgccaaaaggcattttttccttaaaaaatcacctctgggctgagccaaacgtggagtaatgggtccagaaagagctcttttttctcttctcttctcttctcttctcttctnnnnnnnnnnnnnnnnnnnnnnnnnnnnnnnnnnnnnnnnnnnnnnnnnnnnnnnnnnnnnnnnnnnnnnnnnnnnnnnnnnnnnnnnnnnnnnnnnnnnnnnnnnnnnnnnnnnnnnnnnnnnnnnnnnnnnnnnnnnnnnnnnnnnnnnnnnnnnnnnnnnnnnnnnnnnnnnnnnnnnnnnnnnnnnnnnnnnnnnnnnnnnnnnnnnnnnnnnnnnnnnnnnnnnnnnnnnnnnnnnnnnnnnnnnnnnnnnnnnnnnnnnnnnnnnnnnnnnnnnnnnnnnnnnnnnnnnnnnnnnnnnnnnnnnnnnnnnnnnnnnnnnnnnnnnnnnnnnnnnnnnnnnnnnnnnnnnnnnnnnnnnnnnnnnnnnnnnnnnnnnnnnnnnnnnnnnnnnnnnnnnnnnnnnnnnnnnnnnnnnnnnnnnnnnnnncctggactctaggtgtactgcacctctctaagatatttctttgtggtcatttctctgttccctaatgggtgtgccatatgccacttgtgaagtgggagaggaagctgggacattataacgcagcagagagaaggactgcatggagcctaatggccttggtcatatcttttgcttcagttctcctgtgtgaaaaatgggagcaggactgctgatcgcacgtaagagtgagctgagacaggccaggttcctagcccaagtgtgtagctcatagtatgtgttcagtaaattcgccttttcattctcaagaaggacatttggtgatggcaccagcagggcaccctggagatccctggtctcagagctcactatctgtaagaatggcagttcatgtaagggaaggatcctttcccaatgcctgtaccccaaaagtgcccagtcatgctgcgtattggctgaggtcccggtggagtattaaaaaaataatcgatgttcttcaggggccgtccgctccattccccttctccgcttctctatggccatttaaaacattgcttggctgactaaaaataatagcattgaaaacaaactttgatgaatcagtgccctgggtggggggatgggtgagatccccatgcagagccctgtgactcacagtttgtgactgatagctgcctgtaagtgtgtgctgtttattgttgctggtgttttcttggggcagggttggaatgttgtcctcctgaagtttcacctcagcagctggtctggctgttgccagaagctgagggctccaaagtgacctggatgtgggccctggagcctctggctgcatatggagccatggaaaaggggatcatgcttggagaaccgggttcagctcttcgacttgctggactcttcttcatgggacagagcatatacagacagggtcaagggacagggctgtgtcaggcctgtgtcttacctcttcctggtccaacatctaaggtcagactctactgcaggcaacaggtgtacttacgggtacaaacaggacgcaaggtgcaagtggattaggcaaataattgtctagaatgtgaaatgtagcatgggacataaccatggtgtgtatacggctcctaaagtgtagggtgttcagagatggaccccggggctggctcacctgggtctccacattgtgaaccaaggtgtcagagaatttttaaattcatacctgggcttctggcttgtgttaaggcatttcccaaggtgggacaccaggacctattctagtctaatttattcttttgctgtcttctggagtgtgctgtgtagcacgcaggcttgcctgtgcacacacatgctaccacccacccgcattagcagcaggcctgttagagtaccatgtgctcagcaaaatggccctggctactcccatcccattgtgccagggactggattgtggagaaatctctaggaattgatttcccttacctgaaaccgaggctgaggtgggctaaatgttgctggttccccattccagcttgagtggtagatggggatcctggcccctaagtgtgcattgggttttggcaaaccaactttgtgttgggcctcacgaaacacagagatgaagtcctgtctgtgaactgtccagaggcataaagggactgaagcgcccgttcaaccacagaggtgtccttgagagaaatggcctggttaaggtcacagagtgttgtttaggagcccagagggagagcagccatcctctgaacatcagaaggtttcacagaagaggaaatgctctagctgggtcttcatgcttacaaaagagtctgggagtggggtaggaggctatggagagagcaggccagacagcgtggagagggctagtgtctgggagaggcagggcagctcagggtggctacagcgaggaaatgggagcggccagaggagttgggagggatggtgccaagcagttgggtcagccaagcttggtgtctggaccttgctctgtaaatgtccaggagattttaaagtggaggggtggtgtctaaagccactgctcactgctctcccactgaggcctcaaggccagtaacagcaggtttactgcccgagttatccaggtcagagacgtaatccttatactgccatgtggacagctctaggctatgtctggagcaggttgaaatagtgttttgcccgtcagtagcaaagacgccttgttcagccaggaggctccggagcgagcattcgggtaatcagccgtgactcacgtcatgcgttccttgggaaatgagggggaatgtctctgagctctgtggatgatcggtctccctaaacagaggccatagacaggatcctaacccctctgggtctccctaggccagcccgtcacggagtttttatactgactgcctctagacagtgtatcacattatccaggccaggtttctgattccagagcacactgcagccagccagcatagctgcactccacagtagacttggagaatgttatcggtttatcagaaacaggctctgtctcttaatgagtcagataaggcgggcctggtggtgcacttctacagtcccagcactcgggagatccaggcaggagattgtgagctccaggccaacctcgattacatagtaaggccctggctaaaaaacaaagggggatggtggtaggatgtttgagctggtagggatgtctgctgccaagactcacacataacctgaggtccgtccctgaacccttcatggtggagggagagaaccaactccttcaaattgtcctctgaccactacacctatttctacacatgtacatacaaagtaaataaaaacaagagagtgaaatactagagtttaaacaaacagaactcccatctcctgtctggacaggtatctgtaatttgtttcatctgtggagagtcccttgtttttcttgctaatctaagttgatagatatgttctttttatttttcttctttagataagcttttgtgtctatggactttttttttttttttgaatgtatgacattgctagaattccagatgagaccgtacagtgcctctctgtccccatgagtagaaagggacagagcctctgctgcaggcttatggaagaaactcaaatactctgtgtggggctgtttgcaggaagcaacacggtggctgtgtcgcccgccatgattttataatgcacagttcttcaggtttccaagttcacacccggattctcatggggaccctggagaaccatgagcaacgaacacactgatacgagtctacactcagggctggtgtgctcctatgcctttgtcttagagagcagctgagccatccatcttgttgctgtcagagatggttgggttggcagtgcaggcctctggcacatcctgagtctcccctgaggtgattctcttgtgtggtgtacggatgcgtgccggctacagttgattgtttgcagcactctggataggtgagtgagtcatggtgttcacatggggatggctgaggcccagagggtccggtggcaggatttggagttcgggtgcctgaggcttgcccctagtgcctgtcattttcttattgccaagacagaagcagcattagggaagacaggtttattctggcgcacagtttaatcagagggtgtggtctgccatgatggagcagatgtggtggcgtgggtctggtctgtggtggtaagagcttgcagcttggattgctgacaccttgatagatcagggagcatggtctaggcagaagcaggggcaggctgtagtcctcaaaggcctaccctgtagtgctctatctctaccagccaggcctatagctccccaaaccgcaccttcaactaaagagaggagcaggtgtccagatgcaggcagcctatgggacatttcagacccaagcgggatctctgcttctgtctgtgctctgccccacagatcaccaagaggaacatcgtatgcatctgatagacaaagccatgagattagcattgttctcatttcatgagaaaattcagatccgattccttaaaagttcttgtttgtctcaagaaaagggatgggcagaaaatggggttatgcttctttttagaatcaaggtggctttgtatgtgataccttaaaccattctggatatttctttcattttttaaaaagattttaaaaagttattttatgtgtataggtgttttgcctctgtgagcgcctgcatatcccatgcatgcctaggacctgtagctgagaagatggtatcagatcccctggaactgagttatagatggttgtgagcccccagtgtgagtgctgggaactgaaccttggccctctgtaagagcagccggtgctcttaacagttgagacatcgctgcaggcccgacgctgggtattcctaagagcacgatgtggttatgccattattaattacagccagatagtggtcagatctgagtgagcggtcatcctgagtcactcatctctgcacagtgactgtgatatctgaccacagtaactgggagaatcgtaccagcccgttcccatactgttgctcagagtgactgtgtgacgcaatccctcccaagcccggggaagggaccggcctgaggtcctgaggtgagttggcaactgggtattaaaacaagccctgaccctaacctgatgtggtgaggtgagagctagggcagggctggccgagttagggctctgctgctgaatggatggaaccaagtggaggaggaggtagggctcaaggacgatggagggaaggcgagaagcaggggtatcttaccaggccctggcctttctagacccagggtttcgggccacttacttactgcccctggatgacatttagtggcctggaccagagttctcttaagggggcacagagcacttctgctccattttagccttagaagtgctgcttattagctgcgactgggggaggtttagtggctcatccttctgatccagaattttggaaggtgctgaggaaggaatcaaaaataacagcaagcacgccttttctttctctctgcgttaaaaacgtggactgtgccaggcttgtggagcaagcacgtggcccagagtaatgaacgcctgcctgtgccagtggagtccggcacaagatgtgtgtgggggtggggtggggtgggggtaggcacagcatggcttccctcctcccttctcctcttcctcttcctccttccttcttttcctccccctcctcctctccctcctgctgtcccctccacctcagcatttggttttgccattgtctaaagctcatcttccttcttcccttgctctaaagaatgtactggaagtctagggacagcctggagctctgtgaactcttaaactgttgcacaggcacagccctggcctctaagctcataggaatgcagcggaggtgacaggaacgggaacaggatgagaaaagctagctgcctgctcggaggatgtcagtgagttctaaggtgcccattgtctgcctcaatagctctgtggcatctcatagaatggtttgcgtctccccctgcagacacatgcgtggggtgagtgaaggcacagaatagtgattacttatatcctggcttactggagatttggtacagccttgatgatgatggggctaagctggtatcatgctggactttggaaaatattaagctgagtcctttgcctcttgtgcctaggctttgcagttagcccagggtccctcctccctctggtccattttcctactcggcactgcagccaggcctgagtatcagggtgcttttggctgaagctaccctgaatcccagtgaagaacatctgcaatatagaaccttcttgtgttctccagctgtggaggttcatgccccagatggactcaggaaccctcatctttccaccttaacctcttcagctcactagtcttcagtcttgtcctcttgtggttagaacacagatggacacagctgttgaaacattaaaaaaaaaaccaaaaaccaaaaccaaaacatgaacagccccagaggcctctccctcaggggcctctccccaagggcctctatcctggaaagaatccagatgtgtcattagcctgtcgtgctacacgaagtcaatggcagagatagtgggttgtcagcaggcttcctggacctactagggtgcttattgtggcacaaggtacttcttaattaatagctgttgactccgagtgtcttggagtgaggctccaggctcgtgcaggtgtggacaacatgggaaaggactcctgtacttggtcccatcccctgttgttgttgtgaagagggagatgcaaatatatttgtaactgtgctcagagtgcctagcaggcagctgatggcaccctgagcagatcgtctgctttagttggacgttaaggagacagaagggcaaaccagagagaattctttgagtactgtgcccaaaggctatgccttttgtgacccaaagccacacccaaaggtcccctaaggcagttcagatatctgtcttcagctgtggcttagcttctctttttcctactatgaagataacacctgcctttccctcgctgcggggagaggtaccacacccagtgcttccttcctcagggaaggagttgcctagagattcctaaggattccagcttcagagtcatctgtgttccaagccagctgtgtcccactggtctccgacatgccctgtgccctctcctgaaagcatacccgtgaagatataaaactgtaaatgtggcattggtagaaaccgttctggcctgtcacacctggcctctgctgtttcctggaggagcgctctgtatgtaggtgtggaataccctgggtcttttcacagtgcatatggtctggtctttaggtcagctggtgatcttggtccagttcattacaaactgcctgtccctgtccctagcccctactgttttctttccttttgatctagaggttgtcaaacatttcaagctaattcaagatgtttgaagtttgactcttttattcttgcttaactcagttgctgttttggctttgactctctttctcgtcctctctcgatcttctttttattgtgcgtctgtttgcaggtgtgggtattgcattcatgggtattgcattcatgnnnnnnnnnnnnnnnnnnnnnnnnnnnnnnnnnnnnnnnnnnnnnnnnnnnnnnnnnnnnnnnnnnnnnnnnnnnnnnnnnnnnnnnnnnnnnnnnnnnnnnnnnnnnnnnnnnnnnnnnnnnnctggcctttacttgatttttaaagacatgttctctcactaaacctggactcaccagttcagctagattggttggccagtgagcctcttccccttgcctactccataagagccactgtttttacctctcagtgctgagattagtggtgtgctctgtgcctatgtcttcatgtgggtattggggatcaggactcgggtccttatacttgtatagtgtatacttcaactccagagtgcctttgattgtttaaagttactgatcccgtaaacagaggttgctggggtggagtatggaaggggagttgtcttactttcgagtccctttgagcctgggaccctagcagcttctttccttgaaaattctcaagttcccaggagcctgctggtgaacctggcagtgaacgaggcagtgaatcccagctaggctgccccagtatgagaccagttctgttttataagccctggttctgaagttcctggtgcaggctcacctcacacaatgtaccatcgtgtggggagctgtgctggggaggtgggaggggcaactcttgctgtgaccacactgtggaccgcctgcttcagatgtttactgttgccaattgatgagcaggaagtgtatctgtagttgcacgtctcttgtgggctgcacggttgccttcttggggttcacgtgggaagtggttaccggtaggaagaagatggaatagcgttgttcatagaagggctttgctccaggcagcttttgaatgtcatcatttggtccctgtttttttttttttttcctctatctgctttaacttctgtgatgggaaacataggaccatctgctgggcatcctctgcccagctgggctgagtcagaatcctaaatcacacttctctctctgggtttcatttgtgaccactgtggggatgacttccaggcccgcagttcttcagagtgccagggcctcagctccggctgctgtcttggcacctctctgcaaacatctgtacgacgcctgaacctgagcgggtaccacttctcagtccgccatctatctcctccacctgcttgtgtcttctccatcacggtaaaaggttcaaccaagcatgaagagagcgaacagacaaaatgaagtgcagggggcctgtgatgtctgcaggtgacggctcaccgctgtaaccccggcactggaggcagaggcagcaggattaaggttgtcctcagttacatagccaggaggccacacgaaaccttgccgcaaacagaatgagaacagggcctgcaattctagtgtcacgcttctctgctgatgctgactgaggtctcttgaccacttctgctggtggacactggctctgtgactctgggaatgtcacctgctcttctcagcaacacgatgacaagcttgaagagagactctcagaaggcctatggctgccctgttactttccagctctctcctcagtcctcgctggcttcttgccttgctctgcacatgtgttttcctgggggatggatgaatgtaactcttcaccatttcctcaatgaaggagcagtccatccctcgatggccttgtctgatggcatcacagccgttcttcattacattgttaatgagcctgcatcatccgtgatgttgccggaggaggtgaccgggagctctgtccatgagttagaaagcctttgtcgtccttagggtttctcttgctgtgataaaaccaccataaaaacgcaacttggggagtaaagagtttatttcagcttacagttctacagcacgggaactctaggcaggaacctggatgcaggatctgggcttgcttctcccagctcgctcagtctgctttcttatagaagagcccaggccaaccagcgagctgggccctgccacatcagtcaccaatcaagaaaatgcaccaccgacttgcccaccagccaacctgttgggaacgttttctcaactgagatcctttcctccaaaatgaatctagctttctgtcaagttgacataaaaactagccggcacatccataaacatctggccttgtcagagccacccatggtgaaataaagcctcacctggacacctatgccaggcgaggagaaaccaggccacaggctaagagggatttgcgctgagctccaagctcgggtttcctgtgctgcatggcaccagctgcatagcaaacgctctgccttaaaaacacaggaaggaaggcaaatgcgtgcgcaggtcggttagagattttgaaacccacaatcagcctctctcatcctcgagaggccagaatccacagttggctctggtctctctgtccggctgcagctttcacagagcaccctttcaaaactggcttaggcccattctgctaatggcttttctgaggaacctcggccagccacagggccaccgcggctgaggactcccagtggtgacagcagtatttcaaaagctcactgccttttgccttcaggcatcttaagtgaaggagatgaagtctttccattaggtagctggagggtgacctctaaaggcatccagtaagtgcacaaccagctcacctgttccttctacactcttctgccaccctcctcccttgtgatattcaggacagagacttagagattgggctcttgtgtggcagctttgtgaccctgagtgagtcacttcaacccctggtcttcctgtcagtaaattgaaggcgtagtagggctttaaaatttcctctgtcttcaaggtcaaattcttgcacttgcattcaaagaaatgacagttattcattctgagagtttcagaatcacgatataatctctctggggctagaaagtggggcccatagttgaagacagaatggaaagaagtttggggttcaaagtattgtgtggagttgagactcttggagcctcgtcactcacgtttggtagtctgagccactgtggaaggttttttttttttttttttttgccttggcttctgttttagtaaaattctcatcgctgtgacaaaatgcttgatcagcaagcagcaacttaaggaaagaagggtctgttctgctttgtggtttgagggcgcagtctgtcatggcctgggagaaatggtgacagcagcgtgaggcaatgggtaacgagggcatctgtaacgaggaagcagagagagagagagagagagagagagagagcgcgagcgagcatgagctgaatgcttgtatgcttgtatgcttgtgttctcctggctccctcttgattcagcctgggttcctagcctctgggatggtgttgcccacacacagttagggtagtccttcccatttcagtaaactgaatctagaggctctctcacagatgtgcccagtgctctcctaggtgattctagctcctgcgacgttggtaatcagtattaaccatcccggctgcctacaaacgtttggatcctcagaccacttggttcagaattgccgcaggtggaggtgagaacggcggtactttctggctttctctaggtgactgcagtgtgtaactgggactgagagccacagctgcaggtgcttatgtaaggctgtggtttggtgtgacgggcatgtgtgttctgggtggaaagtgatggtggttggctacaaaaataaagcacacgcactaagaattcaggcatcttggggctagctgtgcagatttggtcatcagctggcagcctggttgtctcagcatctctgggtccggtggtttctcaagagctttgaagtagtggaaccatctgcagctggttatttctgctcaggaaacagaagacttggggggtggggccaggggtggagcaggaatggattaaacaggccatggcacacacccacacttggttcatgctaccgaggcctcagccagtgctggcatccatcagtgccagatccttggctgtgccctggtgcattctgggggctctgaaagatggaggagtgggtgttgttccctggttctttggccaaagggttcctgtctttgatggagagtggctgctactatagcactctaagaaatctgttggggcatggagtagatgttaaaccatcaagggcggctgggttggaatctctggttcagatgaagggacagggttgtttcctggaaggaaggcaaaggtgaagaatattcagttagtgtggcatgagccacaggaggtcagcgaatgtgtcaatttgcattaaccttgaaggttcttagagttgagtggtagactaggagctttgcagagttagacttggggggattcaggtgttggcaattgggcagagctaggccgtgattcattcagagggccagggaatccatcagttaaataactagcaagctgtgacggtgcttagagacacagatagtgtgctcttcgtcctcgaagggctcagagtgatactgcaggttttagtaggtggctctcaactggtggtaatgagggcttcctgtgccaggcacacagtgaatacttggaactgggaagccactggtcctggctggggagagagacatggaaggatgggacctaagctagcaagtgacacacgtggcccaacttctgcctcctggtatgatgctctttgtgtctggaagccatcctggtgggtacctcattggcagccagctttaacatgaggttgttgttgtccccccccccccaccccccaagcacttccctagcttcaggaataatttttttttcacatgggattaatcctctgctgggaaactggggtttgtcccttgagctagttggtgagcaactgtaaatgcagcccatgtgttgttcatccctggtggtgccaagggtgtcatttctatgtgggtgatgattccaggtttcccggtcatgagctgagtgtaacaggggcagataaaaaagccacatatagagcaaagtacatacttctaaaggtgggcagcagaggcgttatgtgtgtgtgtttataaaaagcccatattttctgggcagcaaaagcaaactttccagtaaacatctctgcccttgttactttaccttttaattttgtgtttatggtctgtgctttgagattgcataggccgctctgaggccagctctgcctgaacccagctgagcaagccaccctttgcagcttgtgatacagagctcttgccttactgattgacagctccagccaatttagcagctcatgggtggggtggggtggagaagaatcaagcccaacagctcaaggtggagggagaggccatgcacgcatccacttattcccagtgatcacctctgttggcaggaggaaagcctgctgtgtatagctgtgccccaggcttggttttctggcttcctcactcagtttgggttggcctctaggggttgtgggagccccatcccgtgctcctaggggcctgtgcttgaggataggtgcagtgttggcctgtaggtgctaagtagctcttggttgttctacagctcagagggtgagatcaggataaacaggcgggtgagcaggggctggggtagtctgttgtggtcacagagcagtgaggtgaggacagggttacactctggccaggtgtgtcactgcaagtgtaaaaccatgaggaggggcacgagcaagcagaggtggcagaaccatccaggggccctgtttgggagagatggtagcagagcagaggagacatcaggggcttgctgctttgcgggccactaataggaagactattttcagatgttgtctcccaatgaaggggagggcacccttgctctctgtcccactggagggagtggctgtgttctgcaagacgggtgcagcttcctggcaaagacaggggcttacctctgacctttgtcagggtgacttttctctaacagagattgtccagtgagcctggaagggagggtccccacacttgaaccggcagagtctcctagtacgaacagtgcctctagcagctttctctggaaaagtgactttttaaaaagtgtctatgtggggctgggggttgctgcttttgggctgctctaaagaagcaagctgggagcccaggcttggatagaaacgctctggaaaactaaagccccacttctctccttggctgctgtcctggggaccaccctgcctgcgttgcatttttcgaaggtgtaattcttttctttctttatgatcatcattgtgatagggaactggaacaagccagatccccatctgactgggtggtctttgtcttcaatcttggaagggcaggggtgggctagggcacaagtaagtcagcatgcactatggttgccatacactggccccttacataatgtcttcacagtgccctggagagggagtgggtggggcaagtgaccagggacacacctactgaggggtactgagtggaggagcagggtctatggctgtcccttcaggtctacatttattttttaatggcagcatttccttaagaaatgtacctgctgtgtgttttgtctcagaaaaccgcggatctcttacctcctggctcttgagtcggggaagtactgccacagttccattctcatctctaaagccatcttccgttagctggctctttgactcgtttgcctgattttttttattgctcagctttgcacaagtcccagctatgaaggattctctccctccccccccccccccagggtaatcgcaggtagggtgggcactgatacaccaaaggtgatgctgtccaggtccagcttggtgatgccattatctgcatagcttacaggagtgtgggtgattttcacagctgcatcactgaagagcccatcttagcatggttggcagcgcaagatctgtattcctggagccagcagctccactgaagaacccctccccgcagttacttcctgcttcggtaacccgaagaggagccctgcgagtctttgtaagttggtcgtggatgttctgaggctcccttgatcctcgaggaggccatgtttcaatctggaagaaatagctgcataatactaactacattttcttgttaagttggcagattagcaaatggtcatatcgccagagcagtcagagtcctgcatggtagaaaccagttagcagtaaggggtaagtgtgtgtggggcgtgtaaggacaggtaggagccggtgctgggcagtactctctgatgctagattggagccttatgtggtctagatatgttgagcctggttttcctcatgagcgtatggcacacgtgacccaggagctgagcggttccactcaagactgaagacaaaaaagtagacatgagcttgtctggcagcccttaaggctctgcctcaggcctcctccttgaagccggcctctaggtttcttgggtaaatcagcttgggctaagagtgaaggaccctttttacagtaggtcatggtctgactgttcagtgtctgctaagctgtcacccactcgtcctcatatgggaggcactccatgggaatctcttccctgaaagagttacccgccatcgtcacttcagggcaggaggcaggacctcagagttcctgtgcacaaattcatctgcttatcaaccggcttcaggagccatttttcgtgtgtgtgtgtgtgtgtgtgtgtgtgtgtatattcacatatatgacaaatctcatttaccatcttatatttcatagatacacacatatatgtatatatacataatgtatcacatatacatatatacacacataatatctacacatatgatatataacatatatatgtgnnnnnnnnnnnnnnnnnnnnnnnnnnnnnnnnnnnnnnnnnnnnnnnnnnnnnnnnnnnnnnnnnnnnnnnnnnnnnnnnnnnnnnnnnnnnnnnnnnnnnnnnnnnnnnnnnnnnnnnnnnnnnnnnnnnnnnnnnnnnnnnnnnnnnnnnnnnnnnnnnnnnnnnnnnnnnnnnnnnnnnnnnnnnnnnnnnnnnnnnnnnnnnnnnnnnnnnnnnnnnnnnnnnnnnnnnnnnnnnnnnnnnnnnnnnnnnnnnnnnnnnnnnnnnnnnnnnnnnnnnnnnnnnnnnnnnnnnnnnnnnnnnnnnnnnnnnnnnnnnnnnnnnnnnnnnnnnnnnnnnnnnnnnnnnnnnnnnnnnnnnnnnnnnnnnnnnnnnnnnnnnnnnnnnnnnnnnnnnnnnnnnnnnnnnnnnnnnnnnnnnnnnnnntcaggagtcactttcctgctgctgtgagtcccagggaattgaacgcagatcaataggcttgcacactcttacccttggggaccccttactctcttttgtttctcctttcctcttccctcccctcccctcccctcctctcctccttctctgtctctctgcctctctctctttccctctctctctttttcttctttcaacagagtcactctgtaatccaggctacccttgaactcctgcctcagctttctgagtgctgggattacaagtgtgtgccacatgcccacctcagtcggctccttttgattttaattacgtctgtgggaaaggaagtaaaacttccctcccagttgctggaccccaagtcaccacggcccccactctttcattgttgtttttccctgtgggcctgaagtgccataactgctctgccacccagcccctgctgctgtgtgaagagcttcacagttccccaacaccccaacaatctcgccctatctcagggactccagctagagcccgaccccatctccaaacctaagagaaggctagaggaggtttggggttttggctggtcacctgccctccccagcagccaaggacccagcgtgatgctcgtgtgacctcctcagcaagtgagtcactcacctctggataaccaccaggtactttcaggaggaacttctggtgtcattgtggctgtggccatggtttcaagaaaataaggtgttttaaaattgaaagtacagaccgtggttgtctctgctgttgtcacggattttcgcctctccagctttcccttgcagttggccttggcattgtagttggcccctgtttcagatattgataatattcaggtggtgctgcttttatcaatttacctcttttaattctcgcacatggccttctaggaccctccaggaccttctgcctgtataagctttctgaactgctgtagtcagtagttacattgagttattcagagtcttactagggatgtggacctgcatgctgtacttaccacaaatggaatttaatacgggaccttggctacacaggtgataccagagctgagaatgtgggaagacaaggtgacccagagctcagtgggaggccactctcatctttagtctggagggataaagagaagaggtgttgttctgaacacgtagggtcagggtcaccatgggcccctaagtataaagttgattgggttcacacatcctcctaatcctgtgggtagcctggacatctctgtgaacctctgtcctggcctagtgcaggttctcttcctctctacctccctctcccagtcccttcnnnnnnnnnnnnnnnnnnnnnnnnnnnnnnnnnnnnnnnnnnnnnnnnnnnnnnnnnnnnnnnnnnnnnnnnnnnnnnnnnnnnnnnnnnnnnnnnnnnnnnnnnnnnnnnnnnnnnnnnnnnnnnnnnnnnnnnnnnnnnnnnnnnnnnnnnnnnnnnnnnnnnnntccttcatcccatcccctccctctcccccatccccttcccttacctgccccctcccaatcctcttctctcttcctctccagtttctactgctcaaatcctgtcaagcagggtgttagcgacacgcagcagctaaggcttccacagtgtaggaggaaggatgtgagctagccctgtcccaagaggcagacaaaggccaccttgcctagaagccatgtgcagtgtggctgctaagaagggaaagcggaactgggcagatgctctgctgacggtggtaatatgttgggactatgagttggcagggctaattggagctggttccccataggacacaagggagatacttgtgactatttccttgccttccatagcctctgggaccaatggaaggcttgactggcatactttagtgaggctggttagtgccatcctattggaggtcttcctcagtggccgaggataccacggctcagagatggcaagcatttcacctggggtgagtcaggcgaagaactgacccccgatcacgttatttctggtcctcagctgttcaggcacctccccttcagtgttccaagctctggcccatccatcctttggcaaggctttggacaccaaaaccttttgaggcagcctacacactggcttatggggatgggcctagaaaagccatcctgagccctggacaggttagggcatgcaacttcagaccttggcactatctgaattgtagtcagaggtgacattaagatgtgaggtgaagatgacattcattgtgactcccgctcagcctgcacctggagtcaatcaggcactgtcccctcagctgctgtccttggacaaggttgcaggtatttacctggctgccttctaaggccgactcagcatagaagcctcatgcttggctcaaaattgctgcccttcggagagggccgtggcagggtggggcgatgtgatagcggggaggccagggcctgctctagcaggtcctaatgactctaaataaccatgttacaggcagggccttgaacttaataaacacacgttacttctcatgcagccacaaccatcagagctcgtaattacctgcgatctgccgcagcacaggctgcactagagcaggcagggatgtgaccacatgtctctattgcagccctcaggacccatgcttcaaccttttttaaaaatcttagcaggttgtggctgccttggttggccacagcaatgtggactcagagttgctgtcattttctctgcagttaagtatctgtgtgttttgaccatacctggtagctccaacttctgagacggcagaggtacttcgtgtaggagatacttggtgtgtggtggcaggtccagaggaatcaccctgaacctggctggctgagtagaccaaaggcaggtcatgtgacttctttgagccttgattccctccattaggaaagtattttaaggttattgtaagaggggtttaatttctgtacaaactttagcttgtctttgtcaccttgctaagagccaggaagtaccagtcccatctttccatcccttggtgataatcagatgtagattggacacttggcatctgtctttattttaaagatgaatgtatttttatgagtgtctgtagtgtgtgtgtatggggactgtttgtgtgtctggtgcacactgaggcctgacgaggatgtctgatctcctggaactagagttccagatggctgtgaggcgggaactaaactgggtcctctgcaagagcattcagtgctcttaaccgctgggctttcaacctttctgctctcccacctgactgactttagctgggtaggcaagcaagctggcacctggcagccagtgtgtcatcctcaaacaggaaggccactgtgttctcctagtccttcaggtactaaagtggccgagcatttaaacagatcggtctcccttttcagtgtctgaggctttagcctgcatttctcagacatctgaggtggtatctttagctccagtatccccagtgtgcaaatttttgacattatgacatgacattgtcatttataaagtttatacccaaggacacagtctagttactagtacaaaactcacacaaaggaccgatctcatgatgctgtaagtggatttaagtcagtttgggtttggcttcatagctattccagggcacatgcagatgtgagctgagcacacgaatgatataaaatggtgggtaaagggcagctgtgggagtgggtcttttgtttgttttgcgtgtgcatgcatggatgtgtggtgaggccagatgtagggtttggaggacaacttcccagagccagttctctccttccaccacagggatcccagggattcaactcaggttgtcaatcttggagacaggcccctttgcctgctcagccatttccccagccccggagtgtgacttgagtgtggccctcaggtgtggccaccctcacgggcatttcatggggagtcgcagacccttgcttggttcagtgacctgtggccgccatcttggatctcttcttgataattagtttctttgaagcagtgctctgtgaggggagggcaggggaagggagggtcagtggggtgaggaatgggatgcggaggaacacgtggttctttctgccccattcctagccgtgcttgcagtgtcccatgagcacaggattcagccagatactcatttcgaagggcttgaaaccgagtgctaggtaagctatcacagctgtggcctgggcgctcagagcttgaaccagaatttgttttggatgcagaaagaaaagctttccaaagcacctctgggaaaacttgctgacccagcaagcctgtctcctcactctattccttccgtccatcgtccatcggccaacaacttactctgaaagtgagcgcggaggaggaagaggaaggttggagctgccctcagggcctttcctcacagcacctcttttcctgtggcccttgaggggagtgtgttcacaggccagcgtgaaggagagactgtggagtgaagttggccctgggcttcgctgcttctgtcctggtcagaatgcaagagtaaaacacaaattctgtgcacaaaaattctatagaccagttaaaagcttgtctagaaccgttgtcatgtgagatcacacatctaggtgaatagtaaaatcataattttctcaagacgatgttaaatgacaaaatgagatgggaaaagcttattttagtgccttgggtggtggtgtgtgtgttgtgtgtgtgtgtgtgtgtgtgtgtgtgtgtgtgtgtatagggggcttggaatccactatcctatgctcaggctggcctggctctttctagtgattctcctgcttcagcctctgagtgctgagatgggaggcaggtgccaccatgtccagctcatggactctatgctatgcacacactatgatgccagtgtgcctgttgtcctgggctggaggtcccaggccttgtgcacacgggttcttgctagatcctggatctaatcacaggctagttgactgaagagaactcacagacaaatgagtatttgcttgatctaaagaactgctggcggtggcaacggcaccattacagttaagggcattacaggctacccttaacttgcccttgggggagcattttggggggagtacattgcattcactcttaggagcttttgcacagcctaggatagaagcctgggcagctctgatttgagtatcagccaggtctgttgtccttgtggctgttaggagtgtgggctatgtggaggctgaaatcctggatcggtcgggtccttctgtttactctttgcttattctagagcaggtcgtcaaagtctttggaagccccagtttccctatataaaatgaagataatggtaactaccaccgagggtggtcacgaggatgaaccaggtcaccaggtctgtcccttcctccgtaaaacctcagtttccttatctgtgagatggggtgaggatgggtaggcccaccttacagggtgagactgagccgacattatgtaagtagttgctgcagtcgtggggaagaaggctgaggaaaaagatggcgttgtgctggtgtgcactcagagccccagctccaagttttaacttctgagcctctgaatgtgtctgaggggctgctatcccagccccctaagcagctctccaagctgttctttagaaactgctagaatgaagacaaatagcagcggttgaaacatgacgctctagagtcatctgagatctcagcctctgtccctgtcagtgccttgaactgtccctccctcaggaaagcctcagtttctttatctgtggaatggagtgaggatgggtaagccttcctcatggggtgagatttagctgactatgtggagagaaagccttcaggggagctgggatacgagagggatgaatgcgcatcaggtacatgggcaggagagattgcttagttggtaaagtacgtgtcacacaaggtcgaggaccggagtttgatccctagagctctcctaagaagacaggtgtggggctgtgcacttgaaatcccagcactggagaagtggaaacagccagccagcctcgccccaggccagtgccattgagagagcctgtcttagaagacacagtagataagctcctgggagaccacacctggtattgacctctgatatctatatctgcatatatgtgtacacacacacacacacacacacaccatgaaccatacaacatacaaaagtagttaaaaaaataaagtatatatgaaaataccataataaagcttattgatttaaaaaagcatatctgaataccgatactgggaactctgtgataaaccttcagtatctcaaattagttgcagcacccgggaggtgaggcagtgctaggactgcctggcttcccctgatcaggtcaggaaggaaggaagaaggaggagggagagagaaagctgatgggtttggccttgtcccctggcccgagccacaatggcaggttttggggcctcaggaagggaacagccctgtggttgcagggccagcgtcagctgtggggagggagcggccagagtgagtagcgggggggtttcttcctgcctggcctcccaagcaggcctctttctgcctggctcaggcctggtagcccagaggcagaccacagagtacatttgaggcctcagccgctcatttcgagggtggggcagaatttttctcctgccacagtgagctaattaaagaaaacaagctttgagtgttgggagaagagaccacagagcgctggggaggatggctgtacagaggaggccagcgtagcccccagagggcaggtggaagtgggtactgaggtactcatgtgtccccagggagaggggggagagataactgtggggtatacagtggggtggagggtaggcttgtcactgaggacagacatggagagagtttaggctctgaggagggatagcagtttgaaatggtcttagatgtggactttgccctgaattgtggattggatttatgtcctgggggcccggctgttagttaacactgcatagtccccacaccctctgctccaaggccacgccctttccactctcactctcctctagagagagtggacgtgactcctgaattctctcagagtaaactgggaccacaagtggcaactgactttatcagttcaaagtcacaggactggaaagcaggggtgaagacaccgggccatgggttgccactggatcaggtatgttcttgtaggaaggggaaatccggcatcaattcctaatgaatgtccgtccctgtatcccaggaccagctccctggctcacacagccattgaaacacagattgcaaaaggcaacttgtttcaggaggcctaggaaacccattcagaaaattcctgtttgttgttaggccttttgaagcgtgaagaatcagaacaccctcaaaccacatagtttttcaattttattaaatttcatgtacaataacagctggtagagaggccgtgctggcctgtggattgtatgtgtgattgttgttgtacagggaggtcttcctcttggagacatgctggcagagagctgggagtgaggtaagacatgtatgcgggaaagtttccattcacctgcatggaagtcacgacttgaacaggaacccgtgagatgtgactgcaagtgggatatgaagagagacgtagcaatgctggaccaacctaacaagcactcaccccaccttgtaccatacacaggttaccttttttctttttttttaattaggtattttcttcatttacattacaggtcacctttttaaagtttcactagtaattaatagttctgaagtttgtggatggtctacttactgactcagagactagtcaggggctgggaatgtgactcagtcagtagactgcctgcccagcatgcatgaagcccaggacctccatcctcagcaccatttaaactgggcacatctgtcatcccggcacttgggagatggaggcaggagggtcaaaagttgaaggttatcactggctacataatgactttgaggctatccttggctatgagagactctatctcaaatatgaaacaaaaccaaaacccaatccaacccaaacactcagtgaaatgttattttcagttcagaagtgagaaggccgtgctctataccattgtgtaccttgaaaatgtgctgagtaagaagccagatatcgccccctccccaagccatcattaagtgattctgggcacacagagtgtccagggttgtcagccttgggagagaagagagatagaggaatggttacaggacatgagtagggctgaggggtctactctggggacagggctagtgtgtttagagaccaacaggtgtcattgttgacaccattgcaaatgaactgaaccgcttacttgtagatgttaaagctctagcactttagcttttgatgtggtctaccatctgtatccaagccaagcacactcctctcctggtggcctccggacactggggttattgtaaggtatgtcgctgaggggaggaggagccttctgtgtgcactgaggccgagcagagcattgttctgtcctggtcaggttctacctttctgaggaacaggagagccagagagggccagggacttgcccaaggccacagagcaactgctgggttgatcgttggattccagtttcagtctgctctgagaatgtcacagtgggagaagttgctgggtaacatctgatgtaattactattttgtgccttccaagggtgctggggagactgccctggtggggaatgcccgggattaactctggagattttggcctgtgtctgcatgcatgttctagaataattctatatgcaccacccagtttgggtgtagagcaaaaggaatgtattgtatgtgaatgtgtacatgaggagtgatggggcatctccatggcatgctgttgctgcttttctgtttgtgtgtgtgtgtgtgtgnnnnnnnnnnnnnnnnnnnnacatacacaggtacatgtgaaggcctgagatcatcctcaggtgtctccttcagttggtctctgcttgtgtttttgagacagttactagaacgtagtgatttgtctcagctggctgcctagtgagctccaggcaccctcttgtctctgcctcctcagccctgggatctaagtgcttgctaccacacccagtccttttctgagagtcccgggacttgaactcatgtccttgtgcttgtgcggttagcacttgaacaatgggacagtttcctcagccctgctcttttcctttccactgtgaacatttggcatggcaggaaacaagcctttctaggacgcagttcactgctcgttctgctttaagactgatgtggacccagcgccgggtgggtgagtctgtgtttatggtgacatgaatcacatgggcatcagtgagttctataaacactgctgtatcagaagagggcttcaagctcaaccagccctatgtgactgtgtgactcggtcctctcgggagcagctctctagtatgctgtcccgggtagtggcagtgagcgtagttatgatggtgccatctgaggaagctgagctggcaccgagtgaaaggtgtatttaatctttaggagaagtaagagaaggtttcaggagcttggaaatttcactatcccgagaaagtatactgaagtatgacccagggacaaggaatgacaagtgctgagtcttattagctctgggacgtttgggcagtagcctctcctgtccaagcctagctgtcataccctgtgcatgactagcatgccagccttcatgtcccctggagtgggtgtgaggcgatggccttgtcaggctttcttgcctgtgcaggcgtttgtgggatggcgggactgaggggcaggcgggattgtacgatgaagtgggttctcctgggaaactggacctggaatgtctgggggtctgttctgccattgaccgcagggtccgaggcacctgttttgttgaaggcagagttagtgaagactcagccccttccctgtaaggattagtcatatcctcccatccaaacactaaccagcctcgaccctgcttagctctatcggaccagatggaggtaaggtgagctcatgtggaatggcctgagatttaattgcattcttgctggtcacctggaaggtcagtgcgttgtgagtgagtggcattgaccttaggatcctctagacctgccttgctagtcaggccgtggtggggtgggctgaggtgtgtgcactgggggcatgcactggagtctgtcacaggtagggcgagtcagaagagaccactgcacactgcttttccttttggaacgtgttgttcacacagtcccacgcccttgcccagaaatgtgtgaaaaccacttgcaatatgccaaaggaggctcttttcnnnnnnnnnnnnnnnnnnnnnnnnnnnnnnnnnnnnnnnnnnnnnnnnnnnnnnnnnnnnnnnnnnnnnnnnnnnnnnnnnnnnnnnnnnnnnnnnnnnnnnnnnnnnnnnnnnnnnnnnnnnnnnnnnnnnnnnnnnnnnnnnnnnnnnnnnnnnnnnnnnnnnnnnncatggccttagcaggggcagaccacagtggataggtaggacccggactcatcctgctcatgtggactgggatgtggtccggtcccctcgctgggtactgaaaggtctccagagcccagcactatctggatctgtcttcactctttctagttggagctcaccctggtccctcttgggtatgctatatgcacctgctgccacatccattggctgccatgtatctcggagtgtgccccagactctcgcacccttctctctctctctctctctctctctctctctctctctctctctctctctctctctctctctctctctctgtcctttgttcccagaatggttccactcccttgccttggttacccccggctctctctctaaccacctttcctttctctgaatgtctgctgagtcacttcctgcctagggcgcagagctcagtaaatatttttgaatgtattaatttggcccttctccacaaaggtaacttacccgtgtgtcattcatccgcccagttctgactgctggagttccctgttcggaagccctgtcttgggcctgccttgctctcctccccctgcctcccaccatttggggaagtccaaggtgctgtggtgagggatggggttgaagagagtttaaggaagcagcagagacctgtgcagatgtgagttaaggatgattgagttccagctgtgacctgacctgccttagggaacctagaacaggtggagaactaggcactactggcccagaaataggaactcagaactccaagcactgtctgggcttctgtctcatcatcagctactcactcggccctctcatctcagatgctggtagcttcgacctgtcatgtgtagcagtccaatgtctgatcgttactcctgtatggtttttctatgcatctattgaacagaacacaggggcctgaactgagccaacaataatgacttccatctcctgttaatcccggggaagcttggcactctgtcacttctagtagccaatgtgggggccaactgtgtacctttctctttgtgtctagcttgtttctagacctcagtaagcactcagtgtgggttgatcagtgaggccatgtgtcttatttaagggagtgagtagctttaccttttccaaggtgttgacctgcaggccattggagattgtacagaagggagccaggggacctggaggaaggaagggggccagggctgagctgtgtgtaacaggccctgcttttcaaagagcctggcctgctgggtttgttgtggcaatgttcaaaggcaggaaagtagataagatcagacttcagactgctcacccccatacctcctccgcctctaacagcccagagtgtcacccagggcaggcaggcaggcaggcaggcaggcagggccggcgtgggtatttttcaacttttgtaaacgctacactagcacagtgagtggcacttccttgtcctcggagaggctggggaatgaatgagttcaggctttcctgttctcatgggagtgggtaggtgccagtgtgtacaccgagtggcagctcccttggggagatgaggcatgctagccagaatgcctcatcatagaagaagctagacttctacaaagaaaggatcctgttgggcgaggtggggcatacttataattccagcacttgagaagctgaggcaggaggattatggatttcaggtcagagtgagacccctgtctcaaacaagaccaaaagcaagtcaagcatggtggctcatgactgtaaagccagcacttgagaggctgaggcaggaggattgctttgaggtaaatagtgtcgaaaaccaactgatgggtcaaacaaaccaaggcttgtcttttgattcatcttcagtggttcaagccgtgctctgtgccatccttgcttgggtcccagttcagaacatctgaccctgttaccctctgtttcgggggctcgggagggggcacacgtctgcatattctataagcatccatatgcactgtgggcagtaccctcctgccagcccatttcccataatcccgtctgtcatggcaggtggcagagaacagatgactttggcaagggatttggcacacgtggccaggtttatactggatcactatagtcccactatctggttatcttgtttcctcgatggtcattgtcacaccagaaatcacttcctgtgtgggcttcacccaccctcttcccttctcacagaccagacgaacgtgtaacccacagcatgtgtgaacgaatccttcagggctggggtttgctgagcgcctctggaacctcccggtctgtgtcttgggacccagcatttctcacacatgaaacaccgacccttgctttctaggggcaggaaggacagaccgtggcctacgtgtgaagcaaactgtgaagcaaacttcacagagcgtttgatcttgcttcttggtggcactgctccagggcttcaatgtcacccacctgatctggagccattgtctctcaggggcctttgccaacttggctctgccaagaaagagccctggcctagatttttgccttccttttgctgtgtgacttttgagtaagacacctgatttctcggagtcagattattccttagaaaacaggttgagcaaggtcctctctgccacagttgtcctctgcattgagagagacacctttgtccggtggaggggacttcaggtggaagggtatagaggcaatgccgtggcgtccctgcagggctactggggagatccctcacgttgcaagtctgggatgctgagaagtgactgggatagggggtaagagaatttctttgggagccaatggtatcgctgccttcattacaccctagaactttctctagtagctcattcctttccttcaggtcttgccaaagcttgttgctgcagacctgagggatgttttaccttctgtctgccccttgggagcagtcactatgtacaggcacaaaccatgcgtgtaggatgcttatccttagagcaaccctgcacccaggtttcttgggttctgtccctctccagtgggtgagcctgtctctttctggcttccttcccctggcatcaaacctttatcagtccccatcttagtcttttgcaaggtgacacttcatctcattacctaattcgcactacggtgttaatggtgctaatgacgctaatgacatagtgtttattaccccaggggatgcataatgatggtatcagaatggatcactcccccaccagggtttaaaacccttcaggagtttctagcctccttagctgagtttcctccacctcagctatggttctgtaagccttagtcacctccttgcttttacccagcaccctgtgcagtgcctgttgtgtttaccatgtggatttaagaggcacaggttgcggtgactcacttcgaggcaggctctctccgggtaaccagatgcccgatgagtaacaaagagtgggaataggtaggcacagtggctctgtgagccgggagagaggcatggaagctgggcagagggtgctggacttttagacttcagagtccagaggcatccccagcccaccaacctattcacacagtctatgtattctgtccttttgctgaagatgaggtacgggacaactggtttcccaagtgccagaggaagggacatggtgtcaccgcacacttgattttcatgcagacctcaggtcatttgcagatggtgttgggcggagcagccatgggcctcggtgtccaccaatggtgagccacttctgagcactgccaaggtcatgtcagtgccccatccactcaactgccttaagtctgtcctttgtacatgaagaggtttttctatacctcctcacaacccatggctttgtctgcagaaaacccttttttttttcctctgtgtagcatatgcaggggctgtgagctgtagtggaagatgagtgggtggtgtggcttcgtttgggtctcagaagatgaattattaggaagtgaggcctcttgacaccacacactgacactgagaatggaaagccagccttcctcacctgagtcacaaggtctccttctgcttccagaattgctcccctctagcctcgattactgccaccccccatacccgccccacacccacttgtttctgagacagagtttcgagtagtccaggctggccttgaactcagtatgaagttgaagatattgagttcaactttgaacttgtgatcctcctgcctctgcctctcaagtgctggggttccagtctctggtttatggggtactggggatcagacatagggcccagagctttgtgcagggtaaacaggcaactgaggcacctcccatctcttggggtgatcagcccttccctgcccagaccctgtcccttggcttctgatcctgtgcctggcttgtcccctggtatctgtacagtatcagtgccccctgttccttggcctgacccttggggctctgatgctcggcttccaccagtctcaagttggatttgctgcaagtctgagcagtcaaggacagctaccacgtgagagagggaggtctgtaaaaactgctgtagctcaaaatagccacagtgtccagagaagccaagaacgctgttgtcccccactttgctgtcactactgagcatcctctgtccctgtgtcccctcagtccaccagcatgtcaggatcttggcatggaccacagtgtgtcaaaataatgtgtgtggtctttttttcttaggcccaaacaggaaatccctcatagtctaggcttggtagactgagctctgggtagagaaggtcaatctaccaagaaggtcaagtcaaccattcctgtctctcctctggatgctagggaggtccttgtcctcatgcaagttctggctcttctctgtctctgattctaaaacagaatgcttgggcccttgtgtcctactttgtggctggtgacttcatagggtgacaatgacagttgggctttggttaggaaaaggaaactggaattctggagatataagtgaccctgaggttgagaaaaacccacactaaggagaaagaaacttaatataataccacatagaccaaggcacactattctgtatgcataggggtgtgtgtgtgtgtgtgtgtgtgtgtgtacgtgcgtgcgtgcgtgtgcacacgccagtagtctctggtgtctgtctcctcagagctgggcgactcgagttgccacacctggactgttatgtgaatgctgggaattgaactcagggcctcatgactgtgggagataaaatacctgcagagccatctccccagcccaccgtagtcctttgcaaactggcttatcagttcccatggattgatttttttgttcaccttcaaagcacttgctcaagagtaatagcttggtaattgtttgttgacggaaaggcgggtgaacgtcatttgggaatcctgactgctaggctgtttgaaagacatgatttccattgtgaattctttgcacgtgggaacgattttcctgtgggatgcttgcctggagggaaaaatgttttgcggtagcaggtttgaaaaatggagccattttgctctgacggaagctgggtgacctagggcaagtgcctgggacccctgatcctcatctgtaaagtgggaggggcaggggcagccccactaacttctggcagccttgagactctgacttctgggggggaggtgcacagagctagagtcctctgaagtaggaagaatgcctttgtgccaatgaggaacactgatatgggggctcagaaaggaagccaggagacacacacacacacacacacacacacacacacacacacggaaaggagaatgggggtaagaaaggaaaaaaaaacatgcttcatggacgggatgagtaaaagtcaatgggctgagaaaacccagctctgaacttcacatgaccccgcgtgctgcctgcagttgcgacatcaaatgccccttgagtactctcagccggccagtgatgtcagcaggctgtggccccacaggaagcagggctgccatcaggatggctcaacatagccagctcctcctccacacttgaaaccacagctctccagggcagtcagagggggacccggctcaactctggaaaacaagctctcgctcatcccttggtggtgttcatgcaggcaagagctgctccccccagaactgctccgttacaggctaccctgtctggaaccagtatgttccttcaggggtgctggtaccaagtgcttttgcttttctgagaccagatcttgctagatagcccaggcaggcctcaagttcaccttggccttttgtcaaggcttccttggtgttgggattataggtgtggccctgagttcagataacttgagtctacctgcagacagatgcagtgtttatccgtaaccccggtaaaattagagctgtccctgcaaagtcacaggcacaggctgcaacaaacaccaaaagaccatctcagatgacctgcacacacatgcgcctgcattgaaacgaacgtgtacacacatgcacgcacatcaggacacaagactgtaaacactgacagccttgctgacgtgtaacctgtctgtcatgaaacagcctcagagtatgacggacgctccatgtgctaatgagtttggacaaccatcagcactgaccgattaatttccttcaccattaaaacaactcctcccccagaactcccccagaagtcactcctacccctctccttggctttggcatcgtcaccttctttctgtcccgtggatttgtctttttcaggatggcttgtggacttcaccaacacacgctcttctgacctgcatctttggcgtagcttgctgtagtatgcatcggcagcgcctcgattcttttatgtgaccatatagtactccacggcagaggcttatcaccttttgcttgtcagtttttcagatgagtggttttttctcttttggctcttatgaataagactgtaacagctatgtgtctgccttatttcttgcatgttttttcatttatccttagtagatacctagcagtgggttatcagggatgtgtgagggtttcagtctctccacacttgctgacacttgctgttgttttagccatcctagtggatgtgaggttaaaccttgtcactgttcttatctgcatttccctggtggctgaaggtcctgggtagctcctcacctgccacccactttaaatgaactggtctgtctgtctgtcttctgtctttgagccatgaaagtccccgtgcattctgaaccagaggctgtgaacttttccctccattctgtggattttctcttttacttccctggtagactttgacacccagagattttgctgaactaataataataataataaatctgttttcacttttctgaaactcacaggagcaaaggtctatccccacttcttccccaagaagtttctaattcagctctacctcttagcctttatttctgtgtaatacgtcacgccagaactcagcttccttccttcctctctgacaatgtctatttaattgccaggcgcttaaagaggactgtttttcgcccactcaattttaccttggccctttggttgaaagactgctgacaacatacacaggggctgatttccgtgttcagatgcctcaaccatccacatctgctctctgccagtcttggtaactatagctttgtagtattggccaactgtaaaatatatgcgtatataaacacacacacacacacaatatgtttttggttttttttttttttttttgcctatgtggttatttgtctatatacttttgtttctttggtgtatttgtgtatgtgtgcagattttttttttacctgtgtggtatatttattcatacacacacacacacacacacacatatacacacacacacatatatatacatacatatatacatacacacacacacatatatacatacatattgtgtgtgtgtgtgtgtatgtatgtgagagagagagcaagaaactgagtgtctcttttcctctctgccttatttccacaagacagggtctttcccccaacccccattcaatcaactggaagcttactgtcttgctcagtgaactcctggaacccagctgtctctgtttcttagtgcctgggttccaagtgggcccatgactgtatctaattttgtttttggggggttctgggcatttaaattcaggtcttcatacctgagcaacaagcatgtgtaaccactgaggtgtctcccagcccctacgtgtagattttcttaatttacccattccaaaaaaagagaaagatttgcagaaatgctaaaaaatatagtatgtatgtatgtatgtacaaatgtacaaatcaattatatgtatgcatacattgtatagtcaagggaaagagaggagagtaaggtgaagtgtgagaggttagtacccagtgttgctcacatcaagattctcctgtagaccctagaatcagatcttttttaaaaaccacaagtgttctgtttttctttgcccctcccctctagattgacagctctgtgtaagatgttctttccctcacatgctccgtattcctcccctgagcttggggggggggtgcagtctgaggtaaagcagttgttgtatttgaggacttgagtcaggtccccagaacaacattctggccaagacccggaagcacacatacatgatcctagcatccctacagagagatgggaagcaggcactgaattccctgaaagcttgtggggcagttacgctggtgtgagcagtggccaactgcaagagaccctgtctcaaagaagatggaaagctgtcctctgacctataaacatgcacacacccacacccacacaaatacacgcacacagtaaagtatcttcactacagtaaattctacagttcagacagttggctgcttccctatctgtttctgtcaccaagctgaagctaattaagaccagttgggaccagttggaggtagaagtggcaaccttgccttgccttgcatttcagttacttcacagcgtaggcacacagtcagctgggtgtatgcacctttgtcccaggatgctggtggctcgctctgcccatccttctcggaactgaagggtctttcttgtgcctctctgccctgctcccactttccctgcctgatggaaaaagccagtgtgtgtgagggaggtcctggcccaagctggccaacttctcacggatttggggccactgccacctctggttgtgcttggcacggggatggcacttggctgaaaggccacccagacaggcctctgggggcagggaacaagcagcctttaactcagtacatccgtcattgtgggtggcccagtccccgggaaacagggctttgctgttttgtttggtagcatctcctttttatccttagtagatatggggatggatctctagccagggggtgggggtggggcacataagtatttcatccctttcaattgaggaaatggatagagtgtggctatgtcatagggctagtgacatgtagaaaaagtgtgacctcagcaaagaatctgactttgactcctttgactgggatccatggtctccttggctattctcctttttaaaaacattttttaacaaaacaaacaaacaaaaaacctagtctcggatagagcccaagctagcctagaacttactatatagctgaggatggccttgaactcctaatcctcctgtctttacctcccaagtgttaagatgacaggcactgtacctccacatctgactctgtggtcctgggtatggatctcagagcttcgttcgtgccagccatgcagtctgctaactgagtacgtcctgtcagaggccagcatttttccttgcttgggactttgaaatggataggtacagtctcctccatggctgatgctgttgaccaaaactgcccccatgtgggcctgagagccaacagagcctcataataatcccatatctagggactccccgtggctttttagagatctgctcacatccctgtttcaatggagtctggccacaatcctgaataaaaggcagagtgagtatccctaacccccatccacacagtgtggagtcggttgtcaagggttatgcatctagctgtcaatcaaaggctttcttgggcctacactctcttctcaggccttccttgagaacatgggtgtgaggagacagctttcgggaaccctggctgaatgaatgcctgcaggacgtcatagttcagtgtcacccagaagacgcaaccataggaaagtcacctgttctcccacacatgtcgcgtctcgcccacagctttctctgcgggtattctcagaacagaagtcctagaagaaagtcacacggtacaaacggccttgcttctgacagaaatatgctgagcaagtgagttatctggcctccatgtgctccgggaactgggcagacctctgagatttcttctggttgacacagaatctagcaaggaatgagtgttcccggcccccgagggacacttctgtcatcatcttgaaggacgtcccccagcccaggggagggacatgtgacctttaagccacagttcccaggggaatgatgacatctggctagcctctgctggagtgatgggtggcagtcatcagatccctggcagctcagtcacaggccttgtcctgtttattgacccctgaatggggttctgggctctgcttacaggagtgagtgagaaggaggctctctgggggtggtgtggctgacttcaggagctgagtgacaggaagacagggagcctgacaggaagggttcctgagggagggacattgcgctggagccacagggtgaggagtcaccagataatggggcttttggggctgagaagtccagtggtgagcagtgttcaggattctaagtgtctttctcatgtctcttgttcgattgagttcagtgagccttttgagacagactatcgtgtagtctaggttgacctgaaactcactatatagctaaggatggccttgaactcccaatcctcctgtttccacctcctgagtgctggggtttgaggggtgccttatcaccttctggtttatgtgtcactggggaccaaacccagggccttgtgtacattaagtaagtactccaccaattgagtcgccccagaaggccttctctgagcctctcttggatgccagagcattgctggggtcggagcatggcagggattgagagagcatggcagagaagtagcctccaggtaaaacagggtgccgtggttggtggctgttcctagcgggagtaaagccatgcagtcacttaatggctgtgtggctctaggcccataattggggcacaaggagcaaaccacctcagggtgtattgtcctaaagtgcaggtctacatttggcctcacaaggtacttagaagtattttttatagagtaaccatgtggcctcagatgagagacttgagctttttgacccatactgataagagtatacttaaaagtaagccctgctcttccagtttgctttctgatgccagtgctcactaacgtgggagaaagggtttattacatctttcgggatatagtccgtcatgaagggaagtcagagcaggagcttgaggcaggcactgaagcagagaccacagagaatactttttactggcttgttctcctggctcgctcagtttcctctcttagacagctgaggagcatctgcctagggatggcgctgcctattgtgggctaggtcttcttatatcacttagtaaataagagtgtgccttacagacatgttcataggcgattcctcagttgaaagtgcttcttcaagttatacctgggtttggggcaagttaacaaaaactacccaacacatccatctgttagggtggtatggacattgccatcatcatgtctgtgatgtgccacacaagagctgggctagtggagcagtcatggttgttcagggcgtcattcataacaggaaaatcttgacattgtgtgctgagctgtgctgtgctgaactcagaagaaaggatgccactgccagaggaatgttttcagatccagctggtcacggtaggcaggggaggagcatctagggagcagcaggaattctgggtaccagaaatggctccctttgggggtgggttgtctgttaggcaagcagaacatgggtaggtgtttaggaagctggaagccaggtagctactcagctgccaggatgtcagccagctagctaccgtagaaccgtgtgacaggaggcgtggtgtgtcagatgtgttaggggagagatagctgttgtttatcttgataaagcttgtgaactccctgggaatcctcaggctcacctcctccaggaagccaatttggactacacccagttctgtctgcgtgggtcctcctaccactcaaatgggcatctgtctcctccatgcatctctgcctaccctttgggaactggggccatggctgggctggttaacggggtcccagggtaaaataatagtccattttgaggacacagtgtttatagacactcatcagtcaaaaggctcagcagcagacagatctggatcttttgacttcaagctagatatttttcctcgatgctggtctcctccagggggtgatgacccccggttatcctcacataagactgtgaaggtcagagagtgctggctgtgataaccagcaggaccctagctttcaaaagttcaactcattcattaaaaataaatgtgtgtgtgtgtgtgtgtgtgtgtgagtgtgtgtgcttgtgtgttgtatctgttagttggtatggtcatcatgtgcatgcagtgcctgcagaggccagaagagggcaccagatcctagggagctggtggtacaggtggatgtgagccacctggtatgggtcctgggaaccaaatctatgtcctctgcatgagcagttcagtgctgttaactgctgagttgtctccccagctcatctgtcactaaaaacaaacacccaaccaagccccaacctttttcattatgtttatctctgtgtgtgaatgtgtgcaggtgtatctgtgaaagccagaggtcaacctgagtgggtataggttcttcctgtccttctaccgtgtaagtcctagggatagtactcagacttgatggaaaacactttcatcctctgagccaccttgctggcccaacagcgcacccgcaagcagcactctgagcccacaccatgtcatctttcctgcacactcactaggccacactggtgggctttgagcaggtggaacagagaaggggggagggagggaagagaaagagagagtgggagagggaaagggaggaagactgagtttctatgcctgcatctcctgtccctaaaggaaggtctctctaagccatgggggagaactttctctatggaaatctggcattagtatccatggacctggaaatacactggaccctgtttaagtgatcctgcaggcaggggtgaggctgggttggcagagttcctgcctagcacatacaaagctctgggtccatctccaatgccacataagtccagcacagtggcacatgtctgtaatcccagcactcaggaggcggaaggaggaaagtcggaagttcaaggtcatccttgggcccatatatgcctgagtttgatgacagtttgggacacaggaagccttgtgtcaaagagcattgtacacagatggggatttatgcttgggtcttccagggaaggttctggaacatcttcttcagcatgcttcagtggggtactgaacactttcctgccaaggatctggtgctggctacataaccaccgtggagagcaccctgtacactagcagctgtggtcatggcagtggggtgtagcccatgtggagtcatttctcaccacagtacacgctaccgccgtcagataagggctctaggtacctttggctgagaaatggccattctgggtttggtgtttgccaacaaagcagtgcccatgatgaggacatgcagatctaggattaacagactcaagcccttacccacggtgtgctcacctaagatttgggtggaaaaagaaatcaaatacaatcacaaaaagcaccaaacagagttccggtcagacaagttgcatttcactaggcagctggtgtggggtgtggtatacagctgtgaaacagctggctgccaggtgtagagccagcttgaccacatgtgagaggtctccaggttccagggcctcttcatctctgtacataagacccccatctcagagcaaactaataagacaacatctggctgagattttgatctctcagctttgcatgtgtgggtaccgcacacatcgtcttaaagtcacaagcatcctactgcctgggtgctgccatcatgagccaggctttatgtcacagccctgttgccagtgttgcagtacctccggggctcctgccaggttagctctggcctatctctagttcactactgtgttctctgaggccagcactgatatgcaaggctcagtgcaggcatgtgcaatacctgctgatgtgcatggcacagcagaggtgtgtgcagcacccatcacttggagcttggactggtgctgggtggatgtatgtagagttcctggagaggtcaaagatgagggagacactgtgagtcttgggggattgaggtcaggtccaggaggacagagtggaagtagttccgggttggccagagagacagagcaatggtgctgatgtcatagggtacccagaagaatgtcgttacttagaggccactgggtgacgacagtcagggcaagtgtccttacccactgagccaccttgtcagtccaatattgagcttttagttttatttttataggtgtgatggtacatgtgtctcttctaagcgcttcggaggcagagatagaggcagaggcaggtggatggatctctgtgagtttaaggctagcttggtgtacacagtgagttctaggccggctagggctgtgtagtgagaccctatcttgaagaaaaataaagacaaagaaattgatcatgtcaatgtcacagtcaggaactgggcactttccagggcctggagctccctagggtgtcagaggggatcggagaagggatgaatttcttgtatctcaagcccctgccttgacattgagtctcataacatatcgtggtgtttctatttttgaatcctgtttgtttcctttttggaagcaaaagatgtgacctctgtaacacacggccattgtgactgaagggtagacctggtagaggtccctgcttaggatggtgactgcattgggcagtctcttgggggatctcctgaagagccagctagcccatcctggggaatgagagggctgagctctgtggagtggagttgtctggcctctgggtagatggtaggatccatccttcacggactccttgagtctctgaagagcaggttttaaaagaggggtgggtctctgcggcggctgctgaagctctccctttagaaaggaacgtctcaggattgcagggggacccagggtccctgaatccatgcccttcgtcagtgccccacatcttggcatctgtagcttggtggatgccaggcccctgcatctttgtgcacagatacagtgacctatttcctgtggcctcttctccaccctgcctggggggctggggtgggagggtagctctccggctgcctaggactctgagtcacaaccccggcgtggagcccggtggggatttccacgcggcctcagtgctgtcttctcctgtttcctgtcagcctgtgatgcaggctggctgccagcaagggcccttggcacttccggccccagtcaccagcctgcctatcatctctgaggacactttagtcccctgctctcttttgtccctgccttgccctggatgggcagctcctggaaactgtgaagggctgtagaggggcaggagggagagtatgtggggagggagagctggaacaggggcagctctgctcagtcaggggcagctatactcaggctctcttatgctgatgagagcattcacgaaggaggcaggacagcaggcccttgtccattcagcttctaaggtcaccagaaagacgtctgatttccttaggtctccctaaaacatctatgactaaaccagaggaagtctccttaaatatctgctgttctgggatgaaaaatactaagccccagagaagtaagtggatggagagagtagctcctagcttcgattttaagccaggatctgtcaggatagttttggggagggaacagggctttgggggttgggtagctctctgtccagaccctgccctgtgaagaggaagccataagactgccagctgtgacattggcattctacaaatctttttttttttttttcattcctgaatcaggtgacaaatcccatgaattggttttgaggaccaaatcatgtgtttcagagatcagcccccactcctggcatattgtaaggcccatcacagggcaactgtgtgacagtgctgccgtcacccctcccccattccagcagtcctgtcctggcaccacatctggtgcacagcaggtgcttagcccctgaatcccaaagttggggtgattaggttggacttacattgaaggtccctaaagaatggggctaagtatgtttctgcggtgactcttggactgctagagtggacagactcttagcaggtcccaccactcgtgagaacaggtatgataggaatgtcctctggtgtccagcaagcctgggaaagaggaatgtgtgctcccctgtcccagcttttaggtgtactgcaggtacagctgaagtgctggttaggctctcaccttttttgtttaaaggccgtgtcctatgaatgaatgaagccaggatcagtgagtgccagggtgccaggtgcctcaagacttgttgatctctgcagggaaaacattcactttatcctgagcccaaggaacagaggattgatcgtctctgaaacagacaaacagatgggcagacaatctatttccctaggctgggagattgcttcattggtgaaggcccaggataagggcttgagttcagtctccacaatgaggccggccaaaggctcttatctatgctgagaacattagtgaatgaaatgacacaaaaagctgtcagccacccagctgccactgagggaaggcctccaacagctaatagcctttctaaaacacacacacacacacacacacacacacacacacacacacacacacgtctgttgcccacaatacctaaagggaacatcctggaatagatatagactgtggagtgtcataagtagctactgagaattgaacctgggttctctggaaaaacaccattgctcataactgtggagccatctctccagccccagaaactgtttaaaaaagaaggtgggtcgcttctgagtaacaacacttggagttgacctctggcctcccaccatactcatgtgtacatgtgcatacacgtactcatgtatacatgtactcatgtatacacacatgcaccagtaggaaccacatgtgtggtatatacatgtgtgtgtatgcacacacacaatgactagggggcgagaggaagagaggggagagaggagagacggggacagagagaggagagagagaggaaagggagagagaatctaagaatctagtaccttcagagaaaatgaaatctttgagaagagattagatggtacattttgggaatatttccagaaaagaaagggacttctctgtccttgggagtgtaagatacctttatacccagtcacaccccctggataggctatgccggtcagcaagcaggtcccatagattgagagccttgcctgtgtctgctgaaatagaaagtgtgaagttctgcatatgatttcagctttcatgtggccttgaacccctcactactgtatgcccaagtgaaggcatctgaagagctgggcagacgtccaagggcagccgggaaggctggtagccagatgaccctgactttgacaaaggtgggaacccaagcctggccttaaagagccagaaacttcatcttggaagtctggaaattgagatggctggctcccactgactagcaagaagctgagggacaagtcaaaccaggagtcgaccactgcaaagcacaggtactgtgaatttaccctcgtgtgctacatcatgatgtttggctaaggagaagctgtatgcataacagctgtcctcaaagattataatggagctgaaaagaagtcccatcattggttatgttatggctgtcatagcacactctcgagcacacacacacatgtcaggtgatatagatgtggaaacacctgagtctcatgcctgtagaataaaaacagagcacatacaatcctacccagagaataatagtgttctaccggtttacatatttattatatttttattattttagaacatacttcctaatgatttggagcctcatttgtgaggtttgggaacagggatgctggcttccacagaccagcaagtatctgaaacaccaatcaagccatgattacaaatcagaccacaagctttttcactgaggtgcactggagagccaaacggtgcccacagacgatgccacactgtgctgacggagtccgataccctgtgtttatgcatctcttggctttgtcattttctcctgtgtatgatgtaatctctggttgatttgctcattgtagcctcaggagtcagaggctataccatatatgtgcacagcacccccaaacccccgccctgacatagaagagaatgcagtgtggcagtaactgagtgtaagtcacctagccaagcatttcccagaatgcatgtcaccatgctcttgtgggcacctactagggaagccaagagggcagaagggcagaataaaggaagtcaggagtcaccagaagtaaacttggtgaacgtctgtggatggataactgggcacacctctgtgcaacttgctgacccagcccctgatgctagacctcccccccccttctgttagatgcacctgagcccacgagctcctgtgccagccacctactctttttcccactgtgtttgcaggaaccttctgtgaggtggcatttctggataagcccaaagggcacatgctttcctcaactagtacgaatatgtgcccccccccctttattgtcattggtcacaccagacacgagcctgtgacctgagcttcagtcctgctcttccatcccgttgtagacggaggcagtcagcgcaggggaacatgacccaccactttctcagccttctcggcccctttcacttttatagttcagcagacatctgtgatggcttgcttccagagtgcgtggtatttatttttgatttgaaatatgaaaagcatttttttaaagacagctgagtcctctgagccatgcccaagggagcaaatggtctgaaatgtgagccttgtgctcactgaagcaggatgacagaggctgctgccgagccgatttgggctggcttaggtcaccgctcagctcaagcgcgttgaccagaagagcaacttgtgggcaagagctgcggccgaggggcgattgattccagccgctcacttaagtgggagccccacatgctgggttcccacagggtgggaccacggcctgggaacccacacacaggcccagttaagcaacttgcttgactaagagttatctgtcttggcagggccagcgtgtgggggcgttcgtccctgggaaacagtctttgatggacagctgcgagtccctgggctgctgtttgggtttcgtctttcctcattttagctctgtgcgtgctggtgctctggtgtcagagtttatgtcacttccttagagtgagtacaggtaaccttcgaggccttttgggagcttagttccatcttgtcaaggggtgtcaagccagatgttcttgaagccttctttacacgtcaggagattggagcatgaattgtgattcctgcccctcatttcctctcgagtggtggggtgtatccaagacactgtgtccggaccccagacttctgggctccagacggtcaacctgtgtcagccatgaaaatactataatttgtcattctgtgttaaatggccactccctaaagatgacttttttccagtcttatccatggctgtcactcaaaactttaagcaatttctggcacacagtaggccctcaggaaatagatctccctcagcttgtggatagtgtggctggctccagtggtggtgtggcactggcgtgtgtgtgtgtgtgtgtgtgtgtgtgtgtgtgtgtgtgtgtgtgtctgctctgtcctaggctcttcgtggtggagttggaggccatgcgcctcccatgcagctccctggggaagagatgagcacagcccacatgggccgcctcattgccagcatggcctggtgcttgtgtgtgagcaacagggcctctctggtgggtgttctctcactgttgtccagtgggatccatttagctctcagacaaagcaggagactggtctcggtgccatgggctaagcactggctgccttgggcctcaaatcaagaccagatgccagtgtgaacccaggcggccaagctgaggattctctcagagccaagctcacagtggacgagcaaatatttaccctgtctgaggttgaatgggaaacgtctactggcgtcttgtttttcctccttctccctctctgcctgccggacaccatctttaaaaagaaaagagcttgtctttagtcctcagtcctgggtcctcctcaggcaggtcctctccttgaacaggtgactggccacctgtctctgctcttctgggcactaaggcctgcagagggcagtaggccactcagtctcagccggccatgtgacagtacagtttttgcagggttcttattgtcctgtgtatgtccttggtctcaagtctcagaagttgtatcattgtccctgcctggacaatggggttgactggactggtgactcattggctggttgtatatctacctaccctatgcctcacaggttttctgcctttgggttctgcccagtaccctggcagagaagttcaaaggcaataaaataaaatgtgcctttcccatcacttaggaaatatgactaagtctgagctagtcgaggcccagctatttgtggatatggttctacatggactctttttttatggtctttattcttgacctgctgggaaaccttttgtgcgggtggggtgggtattggaagtcttactaggtaggctatgtgtaatgtagagaatgctgtatgggctgcctgcttcattacatgcactgtgaagaagggcatgcgcatgagaatcagaactgggtttggatcccagtcttctgctcctgacccattctacagcactggccaagtcattaacctttctgagccttgactctgtgtgtgtgttccaccatattgtttcagacagggtttctcactgtacctagagcatgttacattaatccagctgggccggcaagcaggcgagctccagggacccacctctgtggtccagtgctgcccctggccctcatgtgggtgatggggatcctaacacaggccttcatgcttgtgtgacagacacttccctaaccgagccatctctctagcccctcttttcttttcttttcttttcttttcttttcttttcttttcttttcttttcttttcttttcttttctttttcctctcctctcctctcctctcctctcctctcctctcctctcctctcctctcctctcctctcctctcctctcctctcctctcctcttctcttctcctctcttttctttttttccttaagaggttttatgcgtatgagtactttacctgaatgtgtgtgccagatgcctgccaagggcagaaatgggttttagatctcagactcgggagttacgggtgactgtgagctgggaaccaaacctggctcctctgtgagaacaagtgcctttaactgctgtgctctctccagctccccctcccccgcttttctagtctgtattagtgaagggataggactccctggtggggtttgtgagggtcgaggaagctagtatggacaaagtccattgactttctcccaggtgtatggtgacgacttgccatttccacaatgtttggattttcttagattcttctgagtatcttgacaggcacttgggctagatggaacaagaagaggttgctcttgatctgtgaaaagaattatatgcaaggtttttgttgttgttgttgttgttattgttgaaatggtttttgagaattctaagtccgggatgtctgatagacaaatatagtgtgagttatagagttattttaagtattttgcctttaggctggagagatggctcagtagtaaagagtactggctgttcttccagaggtcctgagttcaattctcagcacccacatggtagctctttagctccagttccaagggatccaacatcctcacccaggcaggcttgcaggcaaaacaccaatgcacctaaaattaaaaataacaaatcaataaacaagcaaataagtaaataagtattttggctccagccagagaaactgaggctcagtagccatgtgtggctagggggctcactgtagtgtgcagtatatttgtagcatctactctacctgctagtgtccccagctctttggagggtagcaggcgcgttcccagaggctgtggctcacttgagttacacagccagcggggagtcctgtgggattcggagcttgttgttttcttcaggaaaggaggaaggaaatgcacctgtgtgtgtgtgtgtgtcccaggcctgagctggacacacaacttcggtgattccattccgtcctcccagtagcccggctagtggctggctgcctgcctgcctgcctgcctgccttgtgcatttgactgatggggaagtgagttcaaaatgctcagcagctctcccaaggccacatagagagagctgggagctgagccaggacctgctgactccaaagccagatagatacctagctcatgtttacctgcctccatcccctgcccagagaaagcaaatttgcatgtagtttcccagggctttagaatgagtgtcagggtgcaggtggtagaacccagagccttgacacgtccttgcttcagaaggcctgagcttgcgtcggttgggtcagtgggcaggtaaagacattccatttgattgaggcttctgactcgttagcctttggctgggctgggttacaggtagctggttagggtgtgaggcagaagagaggagggttaggtggagagagctggctgtactttcccctccacctgagcatgttggagcctccaagcagcgggactttctgcttggggaacctccaagaatgtgggggcgggattgagcaagcccttgaatgcatgtgtatttgcatggtcacttgtccacccactcactcaacaagaatttaatggctgtgctttgggcaagacagttggcctgttaacttgccctgtgcagatattgccccagtgtattttccaatgcacagcagccttatccacccctttataggcatgggaagctgaagctcagggggccagtcccttgccaggactgatggttactgaccggaaggggaggggcttnnnnnnnnnnnnnnnnnnnnnnnnnnnnnnnnnnnnnnnnnnnnnnnnnnnnnnnnnnnnnnnnnnnnnnnnnnnnnnnnnnnnnnnnnnnnnnnnnnnnnnnnnnnnnnnnnnnnnnnnnnnnnnnnnnnnnnnnnnnnnnnnnnnnnnnnnnnnnnnntccccgcccccctccctacagagccatcagccaacaggaagtctgggcactgagcgacattctcaggctttttgggtctttcattgtgcttgtttggtttttaagaaccatcacagtgatccggatgtgcgggaccagagtcaggtggaggtgctccttccagtcctcctctagcatgggggtgaggatggggggtgactggccagtgcttggggatgtgtagctttctgaagactatagaactcacagggtaactctccagagctttagtcattgcccctcacccatcctcccatgggttggatactagtcctgacacaggctccggtaccacacaggtcaggccctcaccaagtatgacatagggcagggatggccaatccaccctcctcttcaggagtcagcctgcatgggagaccatgctttttcagggcctgcctggctaaggctggtgtagtaacaggacagagaaggggtgggggagcccccactcagggcatctctctgctctcccctgagagcgtttctttgtccctctcccttcaagcacagagcaggctcaggctgcagccttccctgggttctgaaagaccctgagcagttactttttacagaggtaacagctggtgccaattggtggagaacctttttcaaacttctgcccacaggataatcttgcacgtagagatggcagctacacagtgggaagacatcttagggagagactagcgggcctttggctctgtgagagggagtggagaggacaggggcatgccttatctccctgtgtgcacttagcagctttccttgcagggaacgggaagtgagtgttgagagttgaaccttcccagggtgaataattctgtccccacagcccttgcagggtcttttggacagcttatggttttaccttcaatgaaactgtagggaccatccaccctggggagtgttgagagccctcgcccactcccagaccggcaggcccccttgtgaagagactgaaggtagaacagctagtggcagtggagtgctccctctccctcccctcttgcccttccctcttctccctcctccttctcctcctccctcctcttcctccctttctcctcccttgttcttccaggctttgctcccttctttaattcctgcctcctccttcttcctctttctcttttctcttcttttctcccctacctctcctagtcgttcctttctcctgccccctcctctttcctactcccctttctcccacccatcccttcttctcctctctccacccaggactcagccagacaagcactggaccactgagttagatccccagccccagctagtgtttcttgcagggtccctgcaggaaggctccaagggtcaggagcagaaggcattgtgggagatgccctgactgggtctattacctgtttcaccagctatgtggctaggggccactcctgtgcctctgtctcagaaaaggatgcacacacaggtttggggttgttgcccttgctcacttgcttcatggagtaaatgacattctgtacttaaccttccgagtgacccggaagcacggttcccgtgagagactggctctttgcaagctgccaggccccctattcagcactcctggcaacctgctgcagtgtctctttgttctagtacactctttctggggttggacagagtctgtatgtaactccttcacccttgacccaggactttcctaagcctctcatttctgggacatcctgtgttgcttactggggcgtttctcttcgcctccttcttcctctggcagtgccgcagcccctactccccctcgatcctgcttgctctcctgtaactcagtgtccagctctcttacaacctattcagtgtgacaaccaggactggatgtatcagccccaccagttgtgtggtatcttccttactggctgctgagataagcggtctgtatagaagcattggccaaactgctcgtggaaatgggaaaagcctttctagatgtttctctctcctcactagaagaaagccgcatcccatttgtcccatttgggtggttcccaacttacatctgtaatgttcctcactctgaagtaagtttgcccccagatgccaaataagatattgttggttttccagaaaaacttaattggaattttttaaatgtattttggggggggggcatgttcccatttgcctctaaaaaacaatgagagggaaaacagaatatggtcttattgccagaaacgatggggaaaatctgaaattaatttacaaagtcattagtgttttccatttgtgaacaccccccacccccatgaatgtcagtacggttccttgtaattaactacaaattagaacagggttgggaggacctttggggatttacacaccaaactctagcagaagtagatgggagggaggcacaagagtggctttggttttcctgtagcctgtggctgtaggggtacgagacagacccaggcattctcctaaagacatcactctgccaacaacccttggaagagcagcagggacttcacaatgctctctttgaaccttctcattttcttcttatactgtgtgtatgtgtgtgtgtgtgtgtgtatgtgtgggnnnnnnnnnnnnnnnnnnnnnnnnnnnnnnnnnnnnnnnnnnnnnnnnnnnnnnnnnnnnnnnnnnttttacttaatttacttaatttttattttatgtatatgagtgctttttctgcatgcacatatatgtaccgtgtgtgtgtgtgtgtgtgtgtgtgtgtgtgtgtgtgtgtctaagaaagccggaagacggcgccggatctctagaattggagcagttgtacgccaccaggtgggtgctgggtactgaacctgggttccttgcaagatcagcaaggatacttaaccactgagtcatctctctagctccctaccttgcatcttttgagtcagggtctttcatttttgagtcagaccggctccttcagcattgcaggtggacgcagcattacacctgtgtgtgtgtgtgtgtgtttgtttgtttgtttgtttttctgtgggtcccggggatcaaactcaggtcctcatgcttgcacagtaagcactttatagtctcagcggtcctcccagcccagcattcccattttctagatgaggcaactgacagatccggggatgggtagcttggcttgagtaacacagctagtgaggactagagccatggttcaggccatgctctccagcggccactgtctcctgtgtgctggtgtgcaggtgactttgtgtttagcaccaggtctcatcgtgaggtgtgctcctcacctgagtggggacaataggatggctagtctgtgtcacccccttccatgtctgctgctcaaggctaagtccacagttcctttaagaagcctgcctctcccttcctgaaggcatacccttctattgctgccctgaaggaaatgggcctcaggttcattagctgtgactgtgcatctgtgtttggacgttagtggtccttactgttctctggtcttcgatgccctaggtctttgttgtcacagagccattagagggctatagcaagggccttggcagccctatcccttgactggcttgtgccatgtgactctatagtgtgagtatgaggtgactggtactgaaaattcacaagtcttttttgcttcatagtaagtaccgtaaaggcttagagtggcctcagttcctgaactcttgtttccttggtgaacttgaataatatatatatatatatgttcatcagccagctcttaggaggcagagaaataggcagtgtgtgtatgcgtgtacacacacaaaaacatgtgcaaaaccacacatacttctacttaattgaaaatcagtttgaggttgtgcccttttgaattcccagggccacttatgcctttcatgtgataaattccatccgagaaggtttttgagatggcttggcgggtaaggaagcttgcaaccaagcctgacaacctgagtccaatccccagatcccacatgatgaaaggagacaaccaactccccacaagttatcttcggacctccacatgtgtgccaagacatgtgtgtatacatacaatcataaggatatatatatatatatatattccaggattagcccattgtgtttacatcttccagcaaagccacacctcctgaacttccccaaatacccaccaactggggagcaaatatataaatgcccaagaccatggtggacatcttattcaaaccagcacactctagtgcccacatcccaaggctcatggccatgtcactgtgttctttcagttgcaagactattttagagtcctgagactcaatacaatctcttaactgtaaccttctgtaaaatcaaagggcagattgcattcttcagcatacaagggcacagaatatttactacttttccaaaagggagggatgagagcctagtgaggagatactggaccaaagcaaaactgaaacccagcaggacaaatgacaaatcctgtagttccatgtctggtatcaaaagccttagatggccctaactttccatgtttgctgccttcaactcttgtctgtctgtctttctctctgtctgtctgtctctgtctttctctctctccccctactccctctttccccaggccggatcctttccctatctgcagctctccttggcagatagcttacagaagtctctcctttcagatgatgttgccatgtagctcagactagccttgaactccaaatcctcctgcttcagcctcctgattgcagacctgtaccaccatgtcagctctagtagattcttctatttgttttagagtatcatcactttagccagaggacctgggctctacaggtctgcttaataccgcagccattttcagtgtaccacagccaaatcgttctggagtctcttctttgaatttactgggctcggtattctttgcatcatgtgctcccctttcatccgagtcaaactcagagtctgggaggtactgcacattgtctacccttgagccatcaccctagctttggttcctttttgcgtctttgatgatactgatttttagcttctaccattctggaattttttttcatggcaatcctattttcctgggtaccatcttgcctatctctgtgtgactcaattctttttgtccatacttgggcagtagctctcattggctgcttcttatttttgtgttgcgtttccccccctccccttgtggaatttattttttctctggtcaattttttcagttcttaatgttgccaagaaatctgctacttcagtctgttttttattttcaacaaatgtttaagaggtgtaattttagccattaccagtcttatttgaggttgttaatttctctcatctgatttttcttctggtaatgtggtcagaatgtttgtgaggccaggatagcaagtcagactatcgtgtgtgtgtgtgtgtgtgtgtgtgtgtgtgtgtgtgtgtgtgtaaaatagagagagagagagagagagtctgagctttgaacccagcacctcactcatgctaggcaagcgctctaccactgaattacatcttcactcatcttttcactttttaagacaggtttgcctaactggccttgaaggtgctctgtagcccaggcaacacttggcttagtgatcctcctgcttcagcttccaggacagacaaacttcatgacctgcactaccaggcccatttatcttgcttcttcttggagtgtggagaacttgccaaagactatgtgtccagggcttccctgaaactgcagaggaaacacagttgttagtgtggtcctagagaggactatgctgcctttttgtgaagtccctcttttctgctcttgaacctcagatgcacaaacactgaggtgctgagtcccagaggggcagctccatagaggctcacataggaataactgtggtgggtggggagtcagaaacccctcacaggcacacacaccttttgggctgtttccccatcagtccgcagagttgctgaccagaaagaaggctattaaaaaatgtccagctttatctttccctgggtagagtcaggactcttggaggacaggaagccttattcctggaggaagtctcatatggggcagcagaagccatacccatgacagggctgtgcacttctggtccctgggaccctgctcccctacaggacattagggctaagccttctggtatcacagatcgacttgcaaacatggcagggttctcacaggagtccttcccagtcagggcagctgaggaactccctgcctggccaggaactgtttccagatgactatgtgtgcacaagtcaggtatcaagcatcattgttggtgttggcacggtgacagcaacctggagacaacccagctgaaaatttaactccttccaggggtgattaagtccccctcatgacctgtttaacccaaggtagttagttgactctacttaggaagatgtgaaatctgttgttttcacattttatttagtgtgtgtgtgtgtgtgtgtgtgtgtgtgtgtgtgtgtgtgtgtgtgagagagagagagagagagagagagagagagagaggggaagcaagagcaagctggggggtggagaggaagggagagagagagagcgggggggggggggtagggagggagggaggaggaggaggaggggagagagagatagatagatagagatagatagatagatagatagatagatagatagatagatagatatgggtgctacaatgcgttggtggaggtcagaggacaactgcaggggagtctgttctccttcagttgtgcaggtcccagggactgaactaaggccctcaggcttggtggcaagtgcctttacatgctgagccatctcttgggccctggcattagcttttcagtgttttgtcttgacttttttgtagaatttgataagtgttgagacaactacagttgtcctagcctatctcaaaaaagaaccatcaagataatctctaaggaccctggctgaaaggtcagttagcacagagcatagctcatgtgaggtctctgctgcccagtaaagtaggctttgggtatctaaggcagccattgaaaggcacctgaaaaaccattctggctgagatgttctcatcttggaaaagaagaaggctagggccttcaggtcactcagaccttcaagatgctaagaacaggatctcttcctattcatatttggggaagaaacaagctgcagatgtcctgtgtgctccagtgatgtcagatgttctgggggcggggggagacagtgattctgattttcctgccctgctcttgccaggattttctctgagggcagtggagcatcctattattctggtccctcctgaaatctcccctccctagcctctaagtcttcagagatgcagagttaactacaggagtccctttggttcaggctagaattcagggccctggagctgactggcagctagaatttatatcccatatgagaggcccttcctgttatctgtgtcccttctccgaaacttctcaaacattccctctgaagctaaggaaacctgtagctaaggccctggactcattaacagatccaaagtgtcagaaccatttgtttttgtctttaaccttgacttctcaatcatgaggcagccttaggtagaaacctctccctaaataactgtttgacataagagggtggaagccaggaggcagtggggacagactgaggatgtgtgtcaccatttccctctgaacatgtgttgtgtgtgtgcacatactttgtttcctgctacgtggaggtcaagtcagtggaggactgctttctcttgtgcttttctttactttcttcctgtctcccctttaccttcactcaccccaaaagtgtggactgcccttttccctgaggctgccacagactcaggagggctgtcctatggctctacagggtatttggagctaaccctgccagaacacacatggagatcagcaggctgtgcaaccacagaaaacagaatacatactgaggactcttgccgcacaatccttggcatgagccatctggtctaccccagcaatgctcaggccctggaacttgatatcaatgggggcatttgggagtaaattctttaagttatttttctcattgttgtgacagaagacctgacaaaagtgtcttaaggaaggaaggaaggtctggttttggctcattgtttaagggaacacagtccatcatgatgggaaggcatggcggtagaagcatgaggtggtaagtcatcttgccgtcannnnnnnnnnnnnnnnnnnnnnnnnnnnnnnnnnnnnnnnnnnnnnnnnnnnnnnnnnnnnnnnnnnnnnnnnnnnnnnnnnnnnnnnnnnnnnnnnnnnnnnnnnnnnnnnnnnnnnnnnnnnnnnnnnnnnnnnnnnnnnnnnaacagagaaagaaacagagaaagaaagagaaatgctggtgcccagctcactttcttctttttatttagtccaagaccccagcccatggtgcagtgccttccatattcaggatgggttttcctgtctcagcctatctctaaggatttcacttacaaatatgacagaaaaatgagtctcatatttgattctaaatgtagttaagttgacagatttaactgtcacaattacactctgtcaacttcatacctaaatacatcacctttgaatcataacctcctaccttggcccctaaagtctaatgttcatcccataatgcaaagtgcatttagtccatctctcaaagccccccaaatctgaacaactccaatgctcacaaattcaaagcccagattcttaactgtgagcccctataaaataataaaacatatatttgtaatatacagtgacccagagtctctccacagggggagggatgggggcagggcaagaaaaaaaatcaggccaaataaagacaaaaacccagaagggtgaactccagatactttagctctgtgtttggcacgtggcacttgtggcagaatcatctgggctctacttacgttggctttcctttgtgaagcctacagctttcctcagcatatgccccacagtgttggcatctccagtatcttagggtctccactgaaacttaggcttcaccatcacacctcttggggaaggaatctgaccctgccacatagtgcctggctttagaggctttctgaaaccttggtacgtgcattgatgatatcctgatatcctcaaaaccagcaccatgtgggatgatgctaagttctgctgctagctcaagatggagcctgccctgcttggatctctgtggccccttcgtgcctgaagctgaggaaaggttataggttgccatgttctgcagcgttctcagctcatgggctctcctttctaatatattagcatcatcacaagctgggaccatgtttgttagggcctggtccttgaggtggcttttccgctgtcccattgcaaagtgttgaagctacagccacactctctgcatatgtagtaggattcttcaccaaactctacattttttttccacattctcccttcctaccccaccttaagtgtgagaaagggctatgaaagtggccgcagcacagcctggatgctctactatcttggaatttcctccaccagacaacctagtctgttacttttgaattcagccttgccctagtaagacttgggtgaaacacagcatgtttccttgagtccacatgaatggtctctagcccatatgcctacagtccttgctcccctccagaactgggagtgtgactttttattggccttctggtctcccagggtcccaccagaatggcctgttaacactctgctcatggcatttagggcttctccaccttcattgtggtacttttccacactgtctcacaagccacacagtctggcttatcacagtgaccgccccactcgtcagtacccatcttctgtattactcttctttttgttgtgacatgttgtctgacaaaagctacttaaggaagggtttgtttgaggttggctagaaagcatggtggttagagcataaggtgcctgatcttatttgcatcaagtcaggaagatggggagagagaaggaaggaagagggagagaggcagagggtggggaggagaaacatgtgttccattcatcttgttctttttattcccctggggaccacagcccatgagatggtaccacccaccttcacggttggaacccgctctttagttaagcctccctaggactgtaccttatggatagtcccaggatgtctcctacagaacagttctaagtccagtgaggttaacagttgcaggaagggaagaagacactactgattgttagacgggccaggatgtgtgactccaactactgtgaaccagctagtgtgtactgctgccctgcaaggccaccctgtgttctttcggctccattttgtgtatatggagtggggactacccctttggaagtcagcaagccctgcaagccacagtgttcacaggctgagcagtgtgtgggaagtgggcctcctgtcagaattggtgtgtggcttgaggttcattgtaagtctaatggggcactggcaactgggtgtcagccagggtatgcagcatgtggccagatctccgtcttctaagaccaaggcctaggtttatgtatgaaatcttccagcttttaaaagttggcaaataatttaaaattaaaaaacaaaacaaaacaaaacacttgcaggccaaacaaaacatctgtgggccactgcctatttttgacctcaggcccagaccaattaatggatggctgtcttctgtgtgtccctttccggcagtgggaagtgtccggaagtctctaggattgaccactagtggggcagtgaggtgaaggggagagaggaggctctgagctggcttcaggctgtcagccatttgtacaataaatatttatgggatgggctgtattcaaagctcttctgttcctccggcttcctgcctgacgctttggggtgagccctgtcctgttcacgctgccagactcaaaggttccatgtttctttttgggtacagctaggatagaggcgcaggaagagtctcaggagggagtgtgaggtgacaacttggggcccaccggctctctggccctcaaagaccctttgggaatccctgtggggaagtagaagcccccagggcaggcattctctcctgagcaggaaagggctggaatgggacagaggtatctggttagacacatccgccctcagattaggagcagtggaagaaagcaccaagaagctgtcagcattaaacacggcacatggcgggcctgcctgcatctttgtgtgtgtgtttgtgttttattttacattttaaatgacttaatttcatatattttaaacaatgttttaacatattctttcttctccccaactcctcccagatttctcaacctttctgcccatccaaccttatgttctttctcttaaaaaacccacccacacaatccccccttacaaaaacaacagaaaatgaaaattaaaacacatacacacacaacaaaaccaaaaccaaataaaaatcaataaagcaaaacatatagccatcaagtctcccttttatgttggccagctactcctgggcgtgggacctgccctggagtgtggttgatacacctggtgacattcctctgaagaaaacgtactttttctttccctgcacacgtcggcggtaaatagcttcttggttaggggttggattttgtgtctgctttcccttcccagggctgagattttgtccggtttgaacttgggcaggccttgagtgtgctgtcagccccatgctcttgtgtgtatctgttcttctgtgtctggaagatgctgtctttgagagtcatccaccatctctggctcttagaagctttctccctccccttctgcatagatccctgagccttgaggggatgggtttgatggcagcattaagggctctgagggctccaaagtctctcactctctgcacgttgtccatctatagatctgtgccccgttgtctcacggttgcaagctaggtgacccattagctggcttttctttacccagcattctctgttcttagaagtaccttaggtctctgggcccgccctacttctcatcttcctgttcttctctctctctctctctctctctctctctctctctctctctctctctctcctgtgtgtgtgtgtatgtgtgtcttgcatgtcttgcatgtgtatacatttatgtgtggaagccagaggtcaaccttagagtgtcatcccttagatgccttccaccttttgtttgaggcagggtctctccctagcttggaacttgctaagtaggcaaggctgcatggctggggagtctgagagatctgcctgcctctgtcttcctagtgcttggattccagtgtgaccacttgttgggctttttggttttgttgttttaaacatggactcgggggattgaactcaggtccccaatgcttggatggcaagcacttcatctactgaacactctcccctgacagtcatgttttatttttttgacaaactcccagcagctcctgggagttgtttggactctctggctgcagaacttgatgcagtttcttagctcgctctggctggtttagaatgagaggccgggcctgaggtaccagtggctagagcaactgcagaagctcctggcttcttagggtgtttgagaactgttgtaccaaataacccttgcgccatgcagcctcagaaccttagcatttaaaacaaccaaagatcttgtaaaggggactcatggcatgcatacaagaagctctgtgggtggacagggggcagccacgttgattgacagcacaggattcagtccctggccggtggctcagagaacgcctcagagcacgttcctttcatcactctaggctacgccttcccctccagatcactagagtgtcagttctggctcttttcagagttggctgggcagaaggcaaggcaggggccacctatggcctagtcagttgattgctttgtgcctttaaaactctagcttctcatttagctcccaagagagttttggggagtctttcctctgaactgaggtgaaatttgatatgtagtcaacagtgtacacttaaaatatacactatgatgctttttatgttcaggtacacacacctgaagccattgcaacactcaagacgatgacacttcaaagttgccttctttctttggtagtgtcacccacccttctttggcctgccaggtggccagtgcttgccactgtgccttagcttgcgtctcctgaaatttcatatgagttgaaccacgtggtgcatgttcattttgtctggttttcctcacctagcatactttcagatttggtgtgtgtgtgtgtgtgtggtgtgtatgtttcagtagtgaattgctttctgtggctcagtggcatttcattataaggatacaaagggatgtatctgttggggctggagaaagggctcactggttcagagcccttgtagctcttcaattgggcaggagtttggttctcagcacccagggcagcccataagcaggggacctgacgttcatttgtgacctcagtggacaccatactcatgtgtacataaccacacaccgacacagacatacacgtagttaaaaaaaaaaaatcttttaaaaatggatgttgacattttgggactttaaaatttttattttatttgaatttggggatgttttgtttccattttgaaagagtttattatagggctgttgttgttgttgttttctattttctgaaagtgtgctttgaaaaatatccaaatattcatttagcattcatttgtccccatgtcttcacttagtcagatcactgagggaacgtgtttgccgcctgctgtgtctgtgtgtgccaggctgggtggcactttctgggtacagaggaagttacatcccagctggtagctgactggctcatggggccctatcaggagtgacatgcattgtctgtatgatatagactctgtcagtctgctgagatcttgttcctgcttctctcccttgcctgaccttggcttgccaccctgtaggaccttcccatagacacgccttccatgcgttgagttcatgcaagtcaggcatgcgctctgtctgctgccactgaaatttaccccctctccctgccattttgcttttacacttttgagttttgacacaggtcttggtaagttgcctgggccgcctttagacttccagccatcatgcctcagcttccccagaggttgtctggtattgcaagctctaccagtgggcctggtaaaaagtgagaatttcaagaaagggtgacaggacttggcaagcctgtgaagggcattgtgtctccttcagcctgatctcatagctgtacacacctatgaaagtaccggaaggaaggaaggaaggaaggaaggaaggaaggaaggaaggaaggaataaaaaaagaaaggaaggaaggaagaaagagaaagaaagaaagaaagaaagaaaggaaaaaagaaagaaagaaggaaagaaagaaagaaagaaggaaagaaagaaagaaagggagaacgaaagggagaaaggaagaaaggaagaaagagaaagaaagggagaaagaaagaaagaaagaaagaaagagagagagagagagatagatagatagatagatagattgtccccagatgttggtgttttcagaagttcttacattccctggtcttatattaactcgttctaggaataactgaaatccaggagtctcagaattggatggaattttctagaacgtgagtgaggactgcctgtagcactttatgctgagttgaggaggggacctgtgtgagaagcccctcaaatgtcccctcttactgacgaggaaactccctgggagataggagaccttgcttaatgtgtctaatgagcagcaaagagaaccagactcagaacctgtgcctcagccaccatggctacctggagaccaacggcggcacactgtgaaaattaggcttgtcctttgctgatctttcttaaactctgctgtcctttgtcattgtgacccctgggtgacagtgagcctctctgaacttcatgatcttcttttggtaagtgcagcctcttcctgcagaactaatgtatttaagctagttttatttataaagtacttggtgtgatacttgcttgtatgaagcagccgctcagagttatctcgttaaggcaaggtgaggtgggaaaagctagttccagaaagagagcctgaagcaaaacaggactgcctatagaactgatctcatgcaaaggacattgggaagacgtgggtactaggtgctttgcacatagtaggcactttaatagaagcagacctaatgaacagactctcttcctgcagtgggtgagcagggcatccagctggtcagtgctagtgaggttagagggctcttcatggcttgggctgagagggctcagtccagaccaaggagagcagtgtttggggccttcacaaactgtctgtgttttgtgttgtacagagggtatcttccttctgtctgtgttttgtgttgtacagagggtatcttccttaaagcagcagatgtttccatggcggggatgttgggcgtaggtctgttctctcttcaggaagaggcaatagctgcctccttaagggatgaagggcagctagttaggttagaattttgtgacaggctcctccattttacctcccacccaacccaggtagtggaacactgtggctaatgtggggtgcactggggaggttcaaggggctgtacctgatgtgtaaagctgcctgccgccccgtgtgctgcaggtggagtttggagggaggccttgggtaggaaggaaggaacgggtcgtcttcatgggcctgggcgtccgcccctccttgtttcttatcaggctgtgaggttctctcagctggtatttaacatccccttccactgttgcatacaaccctgatcctgacaccgagtacagttggagaggctgttctctgggcctgggccaagcagctggctttcctgaaaggcaggctgcagcaatatgaaggtctatagcagggtgcatggggtggggggtgaggctggggagtggtgcctgagcaaagggaacacgcctcagtgtatgcatttctcatgtttgacggtttcaggccagagctttctggagtaaaagaatacattacgctgggcgtggtggcacatgcctttaatcccagcactcaggaggcagaggcagactgatttctgagttcgaggccagcctggtctacatagtgagttccaggacagccagggctacacagagaaaccctgtctcaaaaagaaaaaaaaaaaaaaaaagaatacattacaactccctctgagctgtcctcggtagactccactcagggtttcattttccttgtgagaaacaaacaccacgtgaccatgctgaagtgtcccctgctccagagtcccatggttcctaagtttggagcatcccgcagggcgcctctgttctcagtactccgtccaggccagatcctaccaagccagcggtggctgtgagcttctctgagtggcctcatcaattccagagcctgggctggaggctagccaccatgcagccctcttcagtgtgatggagcctcagctccagggaatggtcagtcctagttcggttcctctcccgtgcaggctgattgacaggttgtgctgttgctgcagcttgggatttctttgggtttttgcttttgtcctgagggaagagtggaagtcccgaagcgtccctgtctgcatgttgttgcatgtggagagaaaggcctttctgaaggtggcctcactcacctcctcattccctcttctgtaggggtgattcctcaggtatgtgctgtctcagactctgatgggcagactcaggaggaggaaggtagtgtctacacactgcatagtggctagcatttcttccctgatactgggaatgccagaaagttctaagaggtagagtcaatagagagcagttgtgctgattgcttttggaccagatgacccctagtagagactcctccatcagtggacagcaaggcttgagtgaaaaccctgaacttgcttccagccgaggtcctgccactcacgcctgctctaggatgctgccccagaggtctgtgtgctttccaggccagtgagtcggatattgatgaaatgcccagttgttgatatcatttgggtaaatggatgcaagtccctctgtaaccatcctgacaagaacagaggcatcaaaagagacagccatgtcccttccctttggccatcaaggctacttatacaacagaccccaagagagtgacatttcccagaggtctcacactgagagatggaagaagctcaagctcggtgccagccagagaaggaagagttgtcacacagttctgacagcttgtcagagcaccttgctggagagcccagagctgagggtaaatcagtgacaggtggaaccacaccctgagcagggttgcatagctctgcacatctcttgcttctatttaaatctaaacttcaggtccctgaggatggactctgtgtgtgtgtctgtgtgtgtctgtgtgtgtgtggcgggggaacatctttatttgttcctgttcccagtgtggtcacattgaataactatacactttggttggctgcagggaaccggtgtcagagcctagcttgttaggactgccagggcccaacatttgaccttaccaactatcctagcatggccaatgtccacctgtgccttagccacaggtgtggctttgtctgctggacacagtgagtgacacaggcaagcttcctcattgaaaagaattgcagcatctcttcttcctcctcctcctcctcctcctctccctcctcttccttcctcttcttcctcctcccttctcctcctcctcttcctcatcctcttcctcctccctcctcctcctcctcctcctccttctcctcttccccccttcatctgctgttctctctctcttttctctccatatgtctctggccagcctcttcccctttttctctcttcctctctcctctctctttctgtccttctctgcccccccactctaccttcatttctagatttcaataaacttttttgtaaagattttatttatgtatgtatatgaatacactgtagctgtcttcagacacaccagaagagggcattggatcctattgcagatggttgtgagccacaatgtggttgctgggaattgaactcaggacctctggaagagcagtcagtgttcttaactgctgaaccatctctccagccccaataaacttttatatactaagaaaacaaaacaaaacaacatcaacagaagaaacagaagaactgcagcctcagcacttcgctgctgccggctttgctcaggtgaccagcacccagatctatcaaccctctgctatgttagaccagctgcttgttgagggaccatttctgctgacagcctaatgttgtgtgtctgtggattctttggacttgaacagctacagggtggcttctgatccctgtctatttattacatcttctgagatatgggagtgtagctttctgttatgtactggttttggtttgtttttgagatagggtttttctgtgtagccatggctgtcctgggactcactctttagaccaggctggcctggaactcacagaaatccacctgcctctgcctcccaaggtttaataatatggctgagaattttaataaaatggctgtggtgtacttctggcccgatatgacccattagtcccatttcccttctaagtacaggaggtcacctgggttttcttactaccaggagctcctggcccagatgggcaggaagcttgctcaagtcagttggtggagtcagtagggactttaagatggaagagacaagggtagggagaagccactgagtagaatgagccaaaggatggaggcagtggaggtctcagtgtaggataggtagtgtcctggagctcagagacagagcctggtcttgcagccactctgttttcagaagtggctattttacaagctcgggctttgaccaggaagctgtttagccttaggagagcagcttacacaggatggcacggtcaccctcttctgctggactatacatctggctgactggaggcctctgtgtttggaactctatctccctgctggaaggattccttgctgtcagaggtcagagtgcccccatgagtctgcctttgttttattggaagtccattctccgggacagaaaggagtgcctgttgtctgtgatgctctctcctgtcctgtaaagcctgggacgtacagggccttattttttactacaatttaggatgggaactgctctgatccagaaagaagaggcatggaggtaggaggctggtggtgaagtcccgtagacaccacatcgcctataggcaaagtagcccctctctgaactctgcggtacttaacttcatgtagaaatctatcatttccaagactggagagatttgagttcacattccagcacccaggctaggtgagtgcaatctgtaatcctggctcaagggattcagtgagctcttcttgcagacagacagacagacacacacacacacacactgacaaacaaataataaataaataaataaataaataagaaatcctaaactgatcatctctgtcccttatcttatttccagcgccccaactcttgcctattcctcatgtctgtagccaagttggaaggtttgagaaacccaaaggtggacatgtagctcagcggcagagtgcttgcctagcgtgcacaaggctcaatgttccattttcatgttggcgaaaaatgaccacaggattgtgactttagctgagtgggagagcacacgcacgaggcattgggacaggggaaagagactcctcaagacttttgggcctctgcctgaagtagggaacagggcctcggagcgtgtgtggctcagtgggtagagtgctggtttggcatgagtggagccatggaagaaggaatggggtagaaatggggattgtcgctttcccagctgtactgtttggatgttgctaagagtgttgtgaaacaagagctgaggcagcccttgtcctgggccacctctctgcatgagtgtcactgagttgcacagcacacactaacttcctctgttgtactgggggccctgtgctatctctctggcttctgactcataactatggaagtcaaaactgcagttaacacaaaacctcatttgccctcccctcctactttccctccctccctttctccctcccagtctctttccctccccctcccaccccggctctccaagtcacagatgcccaccttatatttttctctttatgtcttgggagctgtaaggttggctttgctaaaactaggcaagaccaccatcgccacctgatctgctccttctactgatgggctgtgagaatcttctctggaaggaaggtgggggaggaagaaaggcattgagggtggaagaaaggcattgagggcgggagggaaggaggaaagaaagaatgaaagaaaaaaaaagaaagaagagaaaatccaacccccaggcatgcagcctgcctactcggaagtgattcatagtttgattcaagcaaacccaagggaggtgggaggcgggagaactgggaaaggaggcaggaggggtgtgagaggagacttagtccttaactggtttctgcttcatggaagaaagcttcaagggggtggagggagaggatgcagggagggggggtgaggagtagtgacaacaaaacacagaatgactaagaatcctgtcaggagaattgtttgtttggtgaagtgagttgatattgaagttccctggcagagaagacctgagaatggccctgatcgggtgggagtgactgtcagtgtcctacccttgttttgaagagaacaaagatgggcctttatcttgaggtccttaggagtggaaggcccacttggcagcctgctttcttctccgaggaagaaggcttgagaccttctaacagtggatagatttctcggcttatcccctcatcctctttctttcttttcctgttgagttctacattcaaggttggcacacctgtttctctgaaaagctacttttatgcccaccttgtcatgtggtcaaaggaagagatattcctttgggtatataggattcaggctggtgcttcattttagtttgccccagtgacacgacacgccattaacccatttcccagaaggcattttggaagatgtgtgtcctggggttggtctaaggagagttgagctgcacagagggaggcctgggtcaagtagggtgagaagtgattgacaagttgatcaggagaccccccacctctgaccccctctggaatgtaagggataccttggggtatttcctataggtggctcttggcagcctaagcccatcagattgccaagggctgtgggcatcctggatgttctgtgagttatctcttaaaagactaaagagccatcttgtgtcccaatctggaagcaagctgtctcagggtttctattgctgtgaagagacaccatgaccaaggcaacccttataaaggaaaacatttaatgtgggttccttatagttcagaagtttagtccattatcatcatggcagcaaacatggcagcatgcaggcaagcatggtgccggaaaggtagccaagagttctatatcttgatccgcaggcatcaggaagagagagacagtgagcctggcttggacatttgaaatccccaagcccaccttcagtggcacacttcctccaacacagccgcacctcccaattgtgccagtccctgagcccacgggggccattttcattcacactaccactggagctttccaggaacagagtggccacctggatggctttgctaacctggctgccttcccttggcttgcagtggcagaatcagtttggattttagcagcgttatccatagctcgaaagtcctgcagtcctggtggtactgaagagttgagcacttgtggacatagtgtgtggagggaaagccagcgtgtaaaaagcacaactatgaagcagagctctgatgaatcaccagcctccttttcttcttcttcttcttcttcttcttcttcttcttcttcttcttcttcttcttcttcttcttcttcttcttcttcttcttcttcttcttcttcttcttcctcttcctcttcctcttcctcttcctcttcctcttcctcttcctcttcctcttcctcttctgctcctcctgcccttccctcatcccttccctacgtcctgtccaaaattcatcctgctccttcttacagggaagagagaggggacaaagacacttatatctgagccaaaggaggtcatctgtggattcaaacagcctatttggcagttatagaaaatagagtttgttgtgtagcacccaggctggacagcaagccctgcttctctgtgttgttgatcacatcggatgtgacctaacaccatatcgagttttcacttgaaaacaagaatagtgcccccactcagcatacccagggtccttgtattctgggacagtgtctgctctggagtttgtgtcccctcccacctgtgcctaaccataggcgtgcccttagcccagggctccctggggagtggagaagcagacccctctggtgctcctcatgtctagattttccagtgaagaaggtgcctctgatatctaagagggaaggcctgggggctgcttaatgtcttacttacaaggcacagaaagtaacgacacccagatctctcaccacactgtccccctgtctcttcctgatccagagaggccatactcagagtctgccctcaggacaccctgacggccacactgtgtggtccatctctccatatctctccataagggggcaaggctgggttctaggatttttttgggcagtcctttgcacagaaggaaaatttttgatatgagtacttcaagagccatagaaggagaggtcctacatcaattgcctatggctccaaagccactcaagactaatgcaagggaccgttaaagccaccacgatgtttgttgttgttgttgctttgttttctccctgtttttctgggttagctttgccctttggaccaggaaaaaaaaaaggacaaaaataaaacccacatataatccaaattaaaaaaaaaaaagaaagaaaaaagaaaaaaaggaaaatgtaatgatttctgcagagcagtgaaggccagaggtgtgatgggggattacattgttcagatgaatgtgtgcttctgctgatacaggtgtgacttaggaaagtgtgtggctgggcgtggttttcatcgacaaacccaagttaggcaagaacctctctgttttacaccagaggctcccaggtgttgggagaaactgtggcgagaaagccacggttatgtaggagcagagatttggctgtgggatgagtatcctactctgacaacttgaaaaactaaacaggagcgtttgggggtaagttcatgctgcttgtagatgaatcccgaaggcccagaggaaagacattctccacacactaaagataaggccttgtgaaatgactacagcctgctcgggtcatgcagctgagatcagggcagggtgtaggagtgagtcacacaggctttctgtgaactcaggcagccggagggaagtttgtcagcctctcacaagaagatggaatgggcgcttgcaagtcgactaagaagactaatgacggagtcagtgtattagtcggctagtgctgagtaacaagccgtgcccaccccccaatgggccatggggcagcagctgcctggtacttcctggtgctcgctgaggtgcaggggaaaaggaggaagaacacagcgattctgctgatgtcccattgtctaggagcagtcaagggacaagacagtccttgcagccggtgctgtctagtggctgcatctcagccttgcctcttgccatgagtggatgtgagtgatgctcacaggtggggtagggtctttttttttttgatattttctttatttacatttcaaatgtttccccctttccaggtctcccctgtggaaacccatccctcctcctcctcctgcctctatgagagtgctcacccacccacccacccactcctgtcttcctgccctggtattcccctacaatggggcatcaaagaccctcaggcccaagggcctctcctcccactgatgtccaacaaggccatcctgtgctacatatgtggctggagccatgggtccctccccatgtattctttggttggtggtccagtccctgtgagctctcgggcctctggcctgttggcactgttgccccctccatagggctgcaaaccctctaagctccttcagtcccttctccaactcctccattggggacccctgtgtttagtccaatggttggctgcgagcatctggtggggtaaggtctttagaagacttgagcctcagtctccttcactgttgctgttagtactccacaggataactgaaaagagagctcgtctcagggagaggccagaggccagtagtgaggggtggggagcgaggggaaggagagcaagctcgtccttcagatttcctcacttcatggcccgggtttcagagatgtggccggggttcagaagaggtgctgatggagcacgtggaaacaaaaggctcccttcagccctgatgtcctacctccacccgttttcagtgctggtctgggcttgggagtctgcctctgcttttcagaagctctgtggcctttggggagcctctgaaggtctgagctaggcagttagcagtgggtcaaggctatgttgctttctcacatggcagtggacctggtacatgttcacgctgactaggtcctgaggtatttctggagtttctatgttctgttcctgacctgtgaccccttgctgtcccccacatggttgctggaccattgataaggagtagtattggcgtgaggtggctccagcccagccctttcacccaggcggcactctggctgacttcatcctcaccatcagctccagcctctggcaggtccgcatccttggctatggctcccaccaccattttgggacactttacaggtctcatttggagccaatgggaggaagcttcatttcctgccacaggaaattgtttggctggggaagaatatgtttaaagattaaaaccttctgtccagggagctggagggagattttaaagaaagatgtttaggggggtcaaccacgaggaagacactgggtgtgggaagagaactcagtcacagttgggaagtgggtcttgaggtggcttcctgggactgcctttcacaagtcgtttggccactgggagagaggcaggcctggtttagagagagaagctcgtcatgaacacagccttctctgtaactaagcaagctcatggcaacatgagctcagaatgaagacttaattactagatttactcaatgggctcccagccatgcgaggcttgggagggtgtgttctggacacatcagctgtgttaaatccagcagctggaacgcccagttcactcatactgtttggtaagtgttggtgtgcattttgagtgggacagagggaggaaggaggatcagcccaggctttgaggaggagttgccatggttgtctctgaagaagtgaatgagacacttttgccattttgcagtgcgagtgtagattttagaagcagagacatggaccagatgacttcttgaaaatcttatcagatgactggcagtcatgtgctcaagacctgtcgagagtgactgtcttccagccaggagagctggcctcttgctgcagccctggtacagactcctgtgtgtggctctaaggcttgtttgacctttgcttcagactggcataaggggttggatgcagtgagccaggaacaccagagacttaccttatgagccatccagcatggtgctggcggagatgacttgctgtgagcctggagtcctatgaaggtaataggcaccaggaagacaggaagtcccatggtggctgctcctgctgtgtttccatatcacccaagccaggaatgttggtctccttccttagccaggcatcgggcatgggagtgaggcagggaagaggcacaggaggttactgtgcagtgggttactgttgcctgatgtgtttgcactcttcccagagctacacaaagtgtcttaggtctcatacgagtctggtgatgggacttctatttcagataaagatgtaaagcctgaagttataagtggtttgctcaaattcatagagttgctaaacatgggaacagtaaatccaggcttagacaagtccagagtcttcacctctctcgcctggtataaattacaaataaactacccacacctaaagtgtaccgtctggtaaatttcaacttgtatctgtccataaaaccatcacaatcagatgacaaatagagccggcatcctgctgatatctcccttcccttggtgaatccgtccctcccatccctgcatgcatgcttcaccttcccaggcggctgctaagctgttctcccagagttgattaatttgtatttctaccacagtttgctgggcatgatggtgatgcctgcctgtagtcccagcacttaggaggttgagtcaagaggattgcacaagtttgaggctggccagggagctatattgtaccagccatcaccaatgctagtgtgacatctatgccaaaaaacaaaggaagcggttacaattttacacaaaaaagaacaacccagtttctctcacttatgggatcaatctgctcactgtaccataggccaataatcttttaattgtcagtcaccctttgtgtggacatatcagtgcacttagatgtttgtgcttttgtggacatactgtgttgtttccactggggaatgctcacaagcagactaggtggaccctatggtgggttttgggtttggatgtgaagtgtatcctggagggtcacatgtctgaacacttcgtcctaagctttcatagcactggaagattatgaaaccttcaggggtagaactacactggaggaagtcaccggaggtaggctcccttcgaggtgtcacagcctcctgctcactctgcttcctgagcacatatgcagtctgtccagctgacttactgatcctgatatgtcttctgcagtgatgggttgtagttctctggaagccaaaataagctatttcttccttaagtctctttttttcagagtactttattacagcaactaactaagatgaaagctggtaccaggagtggggtgaagtccatcacagtgggaagtcaggaagcaggagccccaggtggctggtcacagtgcatacacagccaggaaggagactgagatgaaggcttgcctagctcatgtcttcctttgtccaggatctcaccccagagactggtgctacccagagtgggttactctccttatctcagtgaacctgattgggataatcctccgcagacatcacagagacccatctcccaggttcttctaggttcatcagatcgacagttgagactgaccatcacagttttggtcagagtatttaatcacagcaactgaaaaagaaactattacagcaagcttttgctttggacttttaaggaaactccctagttgtctctcagagccattgtatcactgttttccatgcgtgatgtttaagagttctggttgctccacaccattgccagcacgtggcacacacggtccttttaaattacagctgttctgatggtcatatggtggcatctcattgtatatagttacgttttgctttatgtatatgggtattttgcctgcatttatttatgtctgtgtaccatgtgtgtgcccagtgcctgaggaggtcagaaaaaggcaccagagactctgggactagagttacggatgcttgtgaacctctgtgtgggtgctgggaaccaactttgctcctctgcaagaacagcacgtgcttttaactgtggagacatctctcctgtcccttcgatttaatccacgctttccttcttagtaatgacatagaacatctttgccatctttaactttttaaactagcatttgattaagggaatcacctgctatttgaatgttgggttgcttttggcattctttatcctagaaaggacctctgtgagatatattctttgccggtgttctcctctgacttgttacctctctttttgtccaagttttataccgatcagaagcctctctcctgagtcccattgtatcgatatgtcaactttgacttttacggacagtgtttttggtggagcagctgagaaatcactgtctggtcacagagttcctcaatggtttgagatttattctttgacccttagtttctacagaggtgtaaggtgcaggttgaagttcatttttcttagtgtggatcctcaggaggctcagcaccacctgctaaaggattaacccgtccctgctggtgtgtctttggactttcgatacaagtcaatgtcccatgtatatgtgacggtctttgttgggtcttattggtgtcatggtcagttttgaggatgtcggcacactactttgatgatggaagcactcttgctttttttttttccatctactgtttgtctttgtgcatgtatatgtgtacttgtgtgggtttgtgtgtgtgcaggtatgctgatgtgtgcagggacctaggcacatgttcgaatgtctgtggctgccagaaggtagctttggctgctgttcctcaggtgccatccactttgtttttattctttgggacagggtctcattgaccttggtctcaccatataggctaggcagggatctggctgtcccgcctcctctgtgcactacccaagccagctcttctcacatgggttctggagacagaactccttgtgttcttacactcgcaacgcaggtactttgctaagtggatcgtctccctagcacccgttgttactttgaaagcaagaggatacccctcccagtgcccaggagggactctccagctccactcttcctcatggctggcatggcccttctctggccatttctctcctgtccccctctttcccatcagagaggtggccacagcatccagctaaccttgtgttgaggcttatgtcataccctggagggacagtgtggccacctcccttatctttggggacttcggtaaagaaagtgaggggagctgaaggattttgtctccatctactacgaaccactctcttgttgcctcttctttgaccccaactcagcccccgcttgcctagggctggcttagagaataacagcagtcaccggtaacactgagaggatttctccccaggtggtgctctgcaaagtgctttctagtagagatcaggtgaggggagactgtccccatcttacacatggggcagttgagggtcctagtgcccaggcttgcatagtcaggagcatcttcaggtcttaggatttcacatctggctgccttcctcctgtgcctcaagggctagtttcaggctgtcctctcttgttcagctctgtaattactgttttcagctgtaggggctccttggtctgggcctcatgggagggaggtaattacatccttccacaagtccttagtcagcagctctcagtccctgtgaccaggcctagcactgacctttgtccctccctattccaagccagtagcttggagattatttggaccctggttggctctggttgacacatctggccagcccctctattataaagtactcataaaatctgttgaattcagacccatacgtgccatagggacagagggacagctttcagtggtagtccctctgctagtctggcccagctactaaaaaacatcatgccctcaaccctgggctcctagaacagctttcttgtagaaaggacagtcttgcttctcctaatctatactcgccaccccaccgcctcccaacctgtggaccccacacagccagacttattgtagggcctgttgtgctcacatgtgtacacgtacacagtccattcaacatctaagaggccattttttgctttcagagaaaagtaggactccctgccaggtcagctctccaggccattcagcttccttttgtagtcttatacttggcttccaccctgttcagcagtctcctctacggggccagactggtggcatgtatatctacttaggcttagttcaagaaggtccccttccttgagagctgctactctgagaaccctggagcctattgggtacaagagcctctcttccagcctaggggacctcagccttccttagtgggcctccttgtttcttttgggagctgggaccctgttcagcaagaacagttaacagtggtgctcagacctcctggtcccctgtgtctaggggagaaatgaacgcaaatgggcctgccagcagccttgaactccccaggagctgctgggagctggacttaggagacggcagtccaaatctacttaactgacactttctgttccttctttgccatggcaggtcactggatggtcggctgcaggtgtcccatcggaaggggctccctcacgttatctactgccgcctgtggcgatggcccgacctgcacagccaccatgaattacgggccatggagctctgtgagtttgccttcaacatgaagaaggatgaagtgtgtgtaaatccttaccactatcagagagtagagacgccaggtgtgtgagtgtgtccctgccctccccctcctacctactcaggagggtctcagaagcccttggggctgggacctcagtgcgctggcactgatccacctctgttgtgtctctcttggggacagttctacctccagtgttggtgccacgccacaccgagatcccggccgagttccccccactggatgactacagccattccattcccgagaacactaacttccctgctggcattgagccccagagcaatattccaggtaggtacgggtggcagcagaggtggccaggaggcaggggtggtgccatttccccatcttctccagatcgtgggcatacagcagcaggctcttgagccctgactctgaaccgcatccctgccgggaatgatcagtggctggagctcccctaacgatgtttttcttggcacagaggaccctgtgacccttctgcggggccccagtgccgtcatttattttcgaagcggaaatagcaacactgtgtctctcctcgccctcccagcccataaagctggcacgcaggcaggttccccaaagggtaggggctgcagagggtgaggtggagcagcagagggccctgtaagtaccttgagctttggactgggcagagtgggagttgaggcagtaaacagaatgtgctccattgtcagagtgccagtgtttctagaagcccctcactttcatgcaaataatgcgtgaatcactgccaagcacttgggcatccagggaagctgtgctcggccacactagggccaagcagggtaacttttgctttcggggcagtgatccagctgtgttccttttagagtgttctaatttggatgtggctttcactctgggttggtttactggactgaggttggctgtggcccgtgtcttgggtcagaacgcatgcaagcagaggccagttgtctggcttctcagatctatgcaggtagcgctggtctccggggggtaagttgtccactccctgtcagatggcagaccatggagggctaatgcaggctgggaaggctaggcagagttcccagaaacaggtcaccgagggagccaccactgaattgcactctcgctggggagttaagccacatccccctaagacagcagtgaccggagtggccaatctgtacagggacaggctcaaggccacagcaactcaggggacagagatggtgaagcaggcatgtcctaaagcctcccttcttaaccctgaccttgaaggacaggaacaagtcatttacgtatgttgtaggcctagagcaagggattgcagagatgggcgtcaatgcgttaggatccaggctgggaggcagagggcagacgtggacaggtctgagcatggcagagtccgggagctgaccctttcccaggtttcttctaggtgccctgttcctggaagtggaatgaatgcatggtatataggctaccaaatggcatgccagagccagggttgcgttaattttaatagaactgcctgcctcttaccccccagaaaccccacctcctggctacctgagtgaagatggagaaaccagtgaccaccagatgaaccacagcatggacgcaggtcagtagtgtgggcggtgtctgcggccttttccctcccttctgcctcgctgcttcctccctgcctagtgtttatagagtaatacccctcgtgtgcctcatacatccctctgcggcaggaacacaaagtagttttactgacagtgtagcctatccccagatgttcaggcgttaggccacctgggtgtggtgctggcagaaggtgcgagatgggcttgaacacacgaagtgcagggggccagggagagaacctggatggaggaacagcctttcctggtggcgggcaaagacatcagtagtgactttttaaaaagagaaatctacgtatatgtgtgtgtgtgtgtgtgtgtgtgtgtgtgtatctatctatctatctatctatctatctacctatctatctatctatctatctatctactgtctgcttgtctgtctttatgtagtggccaaatgcgaccagtgtgtatctgctgggagggactgagctagctctctcctgctgttcccagatgtctcccatgtcatatgttaagggactaaattggttccaaaccagcagcttcttgaacagagccccagctgccacgcgggacctgttctgcattgtgtagtgggcgaggagggagaaagggtctggcagctgttctactcccacaatggtgagctgtctcacgcttgggctgcaagaggtcgcacaatcctcaaaggggtgaagagggatcgcatgtgtgctagtcactggagtgttatgcttttaggtcaagcgcaccccccccccccaaaaaaaaaaaaccacagacatcccagcatgtggctggcagcacagacccagctggaatgcatggaagaccttcctgtactctgtgccaagtgaccgctgcacacttgcagctacggagtgctggcatgggaagggagccagctaggcagcctccctccagctgcagagcttctcatcagcctgctttctctcccccttctctgtgtggaaaatgactgttataaacaaacatcagcagaatgaccagtgtgtggggagggctggccatgtatgctttccctggctccagtcggcttgctccctctgtttgcttccatctctttaagctctgttccctctcctgtacctctcttctccctgaagggctctgtgggggccaggatttgtgtactcagccaacctaggcacgggtgggtgaaggcctctctttgttctttgtttttcttccaagtaacccacgtggctcctacgctagttgctcatggccttggctttcctaccaggtgagatgtggaagtttctctggttagagggtcacccagatggccctcaagtctcccctggcagcacatgtgcccttttgactaaccttagacctttatgatttgaggtaccgcaaaataggaaacaaacaaccattgaatgcttcctgtatgccaatcctggcgttagatttttttttttttttttttttggaccaggaggaaaattagggcctagtaatgttaatatagttttgcccaaaccacatggctgatatgcaatgcagcaagttgtctaagccctattatggcctctgaaattgttctttatcttcactgggtcaggtgctgccacaggggaaaagaggaagcctgggacccttggctctctcagagctcagagccctgctggggtgaaataaaagagccccagggacagctcaaggcagcttcagggctcagcctcaaggtctagtggatgtcagggggtggggcgaggctgcaagacattcataaataactaactatgctccaaagcacatgggcctttggaaaaatgcagacctgatctctctctttctctctctcttacacacacacaccttcttggtagctaggggtagagagaagatcagagcatgaattaggcagaattagacttctccatgtgccctctcctgccgtgtacaagggatcaaatcagttgctgagttgcaggatttctgaggcagatctgtgagttttcctgaggcaagttccaggtacttgagagctagactgtgagtcggcagtgtgggagggatggaggctaccctccacagcccagggctgtgcagtgcaggaacaggtctccttgttatttcatttccttggggattgtcagtctttcctgagggcaggcaggtgtgtgagctagcctagctgggcccaccgcagcctgtactagagcctggcttaggtgctaaggtggaaggtggttgaggggggcctctaaagctacctactcaacttgtctattccacagataggacaacatgcctagctatgtagttcttgaggttaggcccaggctcctgagactcaaggcttggtctagggtttccttgtggcatggggactgaccctgtcttgattgtggagtgctccaaccatgtcttacaactgtgtctcaccttgcaggttctccaaacctctccccgaatccgatgtccccagcacacaataacttgggtgagtagccatccttaaggtggggactgccccactcctggctgtaactcaactgattgcctcagtgggaagggacagtgaaggtgagccctgccccctccttcactatcagcccagctcaacccacggggtttctggttacagtgatccttgggtcacctcagaacagggaaacctgagatcagtggcccgtaggaaagacagtctatgctgaggttcgtatttcccctgggaagcggtcagacgtgagtgaacgaaaatctcccagacctcagacccaggagacagggggggcttggtcagccaaacacacgtgtgtggctccgggcaaagccacaagcagctgcccagactcggcctctggctcccagaagcttgcttcagacacacgttggtatttcagcagagtatatcatctcataataacttgttattaaaacagcaacatataaggaatttggggagaaagcagtgtgcccacgattgcactgcctagcacaactgtcttaccgtggtctgtctggtacttgtgagagcagtgtattcctgtgctccatgccacagtagccatggcctgtctgccttgcccgttctctgcctctgttcctctgaaaatgtttctccatttggccgtcttgattattactgtgttatctcacggtgtttatgtcagctgaccccactgttcccacaacagtgttcagctgttggactgcaggtcagagttctgagggccactctgccagcctgctagcatctcttcagcgtgggagagggaggctttgcaggagtccttggggctagaaacggcagaagggctcaaaacagatgagaggcccatgcttttattaaaggtagcttttgattttctggtttgtagtttgaaaaaaaaaattaagtgtggattcacagggttgggagtgtggagtcaaggctggcccttgctttccagctcaggaaaagcaactgatcacggtgaaacactttggagtggcggacagacattggacaggccgtggtgcccatttgtttcaagaccttggcagatatcagataaaactcatcttctagaatattgggagatggatgacgagcctttgaaatgtgctggtgtgtgggtggaacaaaacatgacttgagatacagtttaaatctttgtcacataatactgaggggcttggctgagggaaggtcacatccctgatagtggagggactgagttattgaaaacaaactgaaactagaagccaactgtgagcttgacccggggcttcccgcactgggattgctttaggtttacttttggagccatttcaccccactgttaccaggcaggtaccactgtggtgggtacttatctttgaagccatcaaggtcacaggccagtctgaaggtggcagtggccttgggccagattctctggctaaggatcccccacatgcttttagctcttagacctggggagaagggctgagaggggaagagcaagttggggacagggtgagtatttcttgggatctctgcagggtaccccaagggctgctcttcatagccatgggcagaagcgtggcaactttcacgtcacgggtcaggagatgaagtggctaggagagcctctgtactcagctgtacagctacctccagagaagctggctttgtattttgccttcctcaatctgtacagtgtacagatgtcaggggagaatccgtaccgtgtctagagccatgcggaggagaatacttagaccttcacagcccgctcacatctgtgttcacttgtggtgccaaggaagcaagcattgagtagggggctgtatatgcctgagaagaagccattatgtaggcaatgagatgggggcaggggggtgggatgcagacagaagacatgtatgctccaagaaagtcagcagtatggcggtcatcagctggcggggagggcaggggccaggtgaggctgagccctgaattccacctcacccccccaaccacaacgtgaggttgccggtatgctgaaggggtcgcggtggggtcttcatggcagctccctagaggtaatctggccactgtatagagtatgcatttgataagaagttactggagaagaagcagagggaaacccaagtagttggtggctaccctgagggaagttggaatgaaccggatgggacaaacctcagagaggcctgccctcccgaggtgtgaggggcctggagaaaattgaccgaggttgctctgccttacagcctccctggggagtcagggaggctggggtccaaggcccagagtggcaaccattgcttcatgtctgctgttggtccaaggggagggcattgttacaaagcacacaaggcctatgtgaagccttttccaaccaagtcctacggtaggtagcatagaatacctccaagaaagggggaaatcccttccattttgtggccttcccacaatcaggtggctgctgggaacttctcttccttatccactgatcattccagcaatcaaagaacagcattgaaaggcttgtctgacatcatgggagtaggtggattggggagaggggggcctgtctggcagaaagccagagggacacaggctggtctattattaagggaaatcagatcaagaactcaagcagggcaggaacctggaggcaggagctgctgcagagaccatggaagggtgctgcttactggcttgctcctcgtggcttgctcagcttgctttcttaaagaacccaggacaaccagcccagagatgacctcactcacaatgggctgggccctcacctgttggtcactaattaagaaaatgccctactgggttgtctatagcctgatcttacggaggcattttcttaaccaaggttcacctgctctcagatgactctagcttgtcaagttgatatgtaactagccagcacagtgctttcgagaaaaagatgagggtatctcaaggttacaggtgtgccttctaaagatcttgttatgaagttgttaggcaagtgtacagcatccagttacttctctcatcccttccccactccgggccaggccccagctcaggtctggggaaggatgcgctttcagccacagtaaagccacttctcgaaagcagtggtacagttacctgggtgatgagggcccaaaggcatgactgagccccagctggccccggggaacccctgacattgttgtttctctgagcaggggctgtgagctgggcttgttcctatcagacacatcatgctgggtgggtcacctggaacttcctacgtgtctaagtcaggaaggttgaggaaaacaggggacggaagtagcaggttagggaaaggtgacagttggatccctctggtgagtaagctgttccctgcttcacagtgacacatgtagggtgtgtctggggtgtggaaaccaaggtcctcatgagagccctggggcagcagagagctggagcctattgaggtaatagcttcctggagtgcctatgacagggaaggcgggagaagacagggctgggttgtaggagcgatgaaagaccccagaaatgaagagaagccagctgggtccatgctgctagacaggtactttgtaaaggccacctgtagctgcagccttcggtgggcgtgtgagaacacaggcaggtgcttaggcaagtagctcactaggtacatccatgcaagcgtgaagacctgaccacagatcccaagaacccatggaatgctggatgtggtagcattctacagcaagatgggaggcagagactggagactcctggaagctcatgggccagctgagcaggagaccctgtctcaaacacggtggaaagtggggactgacacctgaggcggtcccaaggcacatgcctatcacacacacacacacacacacacacacacacacacatacacacacacacacacacgcatgcacagagagagagagatgtgagtgttttctggaattagtaaactggtccgaggctgcaggagcttgccctcattcctctgcatgccttagctctctgccttaacctcagagactagagttaggacccagatgctggggttacagaggagcaacccccgtagtacatgagaaagtgcccaggtggctgggcatgggatttctttgcatgagggaatgtcttatgccacctgtgttgggccttgctactcagaatcatacagatggggcaggacactccactgaaagggaacaactgaggaagagacagctgaaaggatatggagttggaggatggagtcctgaagactgagccagacctgctctcaatgggtcgggagggcccagactagcccggcttctgtgctttgacctcaagtcctatggttataccccctgtgcagacctttgcccatcgcctgcttcagttcaggggaaagttgatgtgcccccctctcctcccctctgcttctgccaactggaatcttttgcacatgtttttaataggcaccccttaatccgagtgtcgccttctgggttttattctgttttcctttccttaaacaaaacagagagcctgtgccagcttggagcagggcttggaactgaagccagccaatgtgttaggctggcctggggccagtggagaattgagtgccccatgccatttgagaagcctgcctgacaccatgctggtagaggtgggggccctgatggctggggctggaggcttcatgtctccagcattttggttctgggagggtattagcagggactgggcaggctagttgaaactgggctatgtggagtcaaaaatctaatcgaacactccaggtgattggaagccttggtcgacagagcaaactcgtgctcctcggagaatcagctgatgcagtgttgctctgagaggagtcttgagtagcaggtcttcagggtcggtgtaaactgcatcggcatctgttgggaaactttgaaacctggggcgtgctcactccagggaatggcaaggtggccggagcagctaagcccatgttggctggatctcgaagcacactttgttcaaaccttggtagatccgaaagcagagagtggaaccagaactcagggaaggctgtaacccccaaggcctgcttccaaagggacctacatctgccagcttggccctgtgtcacaaaggtttcataacctccttagacagtaccaccagctggggaccaagtattcgaacgtatgagcttatagggtgcattacaggaccaaaccacaactatggcccctttctgttcggtcttttaggaagctcagagtcgagctgtcagtatctgataccacataccagtggtagttctcctctcgccagagtcgtgacttttgcaagaaaagaattgcatatggggcaggggcagggctaccactataggaagatagagtaattatacttttttgctttgtacctgctatggctggaatgcctgaaggaccatctagggctgatagtgggaatggagggagagagagaactcaaaggcacagccatgtgcagcgaattaaaagccacacagggggctatcctattctacctgtttctgagtcagagttgagtcaggtactctctgaagtggcagccttcaagttgtgtgccctggtgccatgacacaactgctgtgagtcctgatgtcgtgtccatctgagctcagcctccctcctttgctgctccgggtgcctggaccatcacagagctgtttagaggagggtacaatatctccttgggaaggcctttttctaccccaaagctcacctttcccagaacagtgttcctccaggtgtgacagacactctgggtgacctgccacctttgtttggattggtaggtgtcagtgttcctaggactaagcccatggaattctagggaggactttgaaatttgggggtgagggagataattgtgctatccgggttactgaggaaggcagggctgacctggagcagccaaagctgcctcttcagagtgacacatgccaggagcacagtgaccgagatggccgctttagttgtcttctagaatcagtcttgacacagactaggaaacagaccagagtaggagatcatgtccctaagtatacacctcaaggtcactagagcctgtacccgggcagtagcagctagtggtactgacaggtcacctggacactttaaaccttggctagccctggtttcttttttctttttttatacaaaacaaaacaacccaaagtgtccaatgcaacatagctcacattctagtggccacattgtttagaatctagcttatctcgttggaatgtggaagcgtggagcaaagccagggccggacatggctgatgtggctcagcccagcctcaggagccaggggcacaggccacagctgctcctgtcccatcactcccttctccatacagtagctttgatcctctgcctctgtgctcctggcctcttactcaactgtgagaacagggagaaaggaagctttgttcttctggaaagtcaagacaggatcagggagttcttaggtccatagtcagggttattatcactgttggtaccatacgctatttgctgcatggccacatcttactcgagttaactcggggaatccactgatggctccagtgggcaggggtgatttagagctgacataggaaacatgaatgaagtcatgctggttcaacataaaagggcagtggctttcagtggggagtgcttccaacctgtagaacacatctgacagtactaggaatagtttttattgtcagtacttgagagggtgaggtatatatatatatgtgctattagtatccagtgagtacaggctgagggtgcatttgaccatcccataattatctagaccccctttctctcaggcagccatatgccctagcttcgggtgtgctgaactggggctgtctctggctatatgtactgtgtaaagtgtcaggattggggctgggtcctcacctcactcttacaaggaccatgtgcctgggctgcaggagttcggggccactttgtcaccccggggccgtctaggcccttccccatggacaacacagcagctgctgttctttggcttggccacttaagggatactgagcacgggcccctagccactctccaaattgcctggcaggcaacagacaggattctcaggccaatgctgagccatccctattccctccatcagagcctcatgcaagggaagagagaggactttaggacctcatagtcaagttggatagttgggacatttatggataccagcttgcacaaaaacacacaaaatcaccaggtggctgcacaaatacttgggagtcctccagagcaagagtctgaggtagatggtgcagtgagcagtaggtggactatttaaatggggcagagtgggcttaaagcccttccctaaggccagcagtagagctatagtgtggaggagcggttggaggcggcagtgtgcaggcagtcccgcaggaggttgtgggattataagagaacagttgccaggaccctgcctgccaaggggaccctgcctgcagaggggaccctgcaaggggctgctgtagagtgtggtgtggcccacaccacagccagaatacacttggggttgcttatagtgctggtcggtcctgacccgtttcatgtttgggttagcctttctccaaaagctgcttctgttcacagaaaagccagacactggggcaggctgcctgtcagcccactgtgaacccagtgtctcctcttctataggctgtcagggtctcccctaaattctgaggatctcactctctagcaccctgaagggtttgtgcaatgggcattgggaggtcagaggaggagaaagtcttccagagcctccctgaatacctattgacctggcacaccccatgtctcttcagacctacagccagtcacctactgtgagccggccttctggtgctccatctcctactacgagctgaaccagcgagttggggagacattccacgcctcacagccatccatgacagtagatggcttcactgacccctccaactcggagcgcttctgcctgggcctactgtccaatgtcaaccggaatgcagccgtggaacttacaaggcgacacattggtaatgtactcgtccccacccctgcctcctggggacactgagacccccagcactgggtgctgtaggacccagacagaggaggtgggagtgtggcacagtgtgtagatgttacctggcctctgcccacaggacattgaatggagctgttttctcatactctgggcctcttgtgagcacaaggggacatccccactgggcagagctcaatgtttatgtaaccactgatgtgctgagtcagctgaaagtgaatttctgtccatctggagtggatttaggtgatggagggaaagagataaaaatgcagactaaactaggagcatgggaagggaggtcattttggcaaggggccagggagtgccaaagccccagtagcaacttcaccaaggcacctctgtgtctttcggagtggggttgggggggggggagagagtagagcagtggggtggcagcagctgtccctccaggcactgttacagtaactgctaaggaaggtgattacccctctcctctagacagaagctcaggcctgaggctggggaatggcagaagttattattgggactgggtccagactctttcctgtgccagctgttccagctgctttaggaacccagagctgcccaccattctcccacttggcttggagtagccacttgcagctctgtcagatgcccgctctccagctggtctagttggtctctctgacccagtatcctctgacctccgcagggagaggtgtgcggctctactacatcggaggggaggtctttgcggagtgcctcagtgacagtgctattttcgtccagtctcccaactgcaaccagcgctatggctggcacccggccactgtctgcaagatcccaccaggtaacctctggaggttgctgccctgtgccatggctcctgaggcatgccctggaagtttttcttgcctttcctccacactggtgtttatgttgacactgtacatgtctgtgcgccactgacctagagaacagaggcagtgtctaacaaacctgtaacccaggatgccctccatcacccccagggattaggcactgtcttcttcattctttgtccaaacataggatgtgttctgggttgacgccaagacctagagcaggatgggaaaggcagacagaggtgctcctgtagccacggctttacaggcctgaagtgtttaagatggacacagggtggttgtgacacacccagagctattagtccccggcaaacagccttgatagcgagaaaggccatctacctgtgggatgatcaggaaaggtatcctggaggtgataggtgtcaggagatggtggggtgaagttttcgagggcatgtaccggaaaggacagtgtgacgagggtgggacattgggtgtgctggataggggagccatgtaaaagacaaggagatatttaaaaggcatcctgggctcaggccttggatcagtgtgatagttctgggtttattctgtagagccgaggtctttctgggggtgtcccctggacccctgagaactgccaggctggaactcccctactcccaaggcataaagccaatgcactcctcatacagtatgtggcctgtgtccagccggctattgcctgggacacattgtagctcctcgaccgttttgctgctgagaagatgacagtgggctgtgggcggggccagccagattgtagaaaatctcagctgggagtagagctttgtttgggcagcttctgtggtttcatttacaaagcacattcacatcgctgggttcactcaactgtagcgatccctgtggctctaagaaaaggctagggagagaagttctgagagtgagcagcttctcaaaagacccagagttttgaggaagccaaagcagggctgcgccatggaggactctggctgactagcctggtgttcagtctgttggctcagctgaggctgcagtcccagaggggcttatggaccacgctttgttttacctccctcctccaggagcaggcaggggtggaggtggaagctaggtggtatattctcagcttgctgccttaccccctccaccttcacagctggtgacggctaaactggccctggtagtgtcctgttagctcagagactgttagggctctgataaccaagcctagcttcccccacccccaaaggagatggtgagtcaagagaagcagaacagagtcacacagcaaatggggtctctgctagtccaccggctactggacacggactctggcctttatcttctgggtcatgcaatcctggcacttggatagcaagacttcaaacaggtttattttcagtgttattagtgcctgtctctagctatactatggagaatttagatacactttgttgttaatgtcacctcagaccaagcctgtatccggaggctaccatgtgacccagctatcttccccagcccgagcatgagacagggctatctggtggaaggtgctctgaccctctgcagagcatccctatgttagcaggtcccatgcccacctcattgccatatgccctgctactgtagcaatgcaggagcacctgtccccaggtggctaccacacaaggtattggaaaccaagctcaggtgccctgcctctctgaagcctagggttctgcctcagcctctccaggccatacctgtatcacctgagcccacttccaagcttccttcttggcatcccagcatctggaggtggctcctataggccggcctgtagcatcccttgcacatgcatctccctgctaagggtgtgcagatcaagtgtagtaatagagaaggcctatccttgcatggtgatgagctcagagcagatagccactgggtgggaccgtagtatgccacttgaggtgtgtgaatccaactgttcgggtggtcctgggattggcttatctgacttgtctatggttggcaggctgcaacctgaagatcttcaacaaccaggaatttgctgccctcctagctcagtctgtcaaccagggctttgaggctgtctaccagctgacgcgcatgtgcaccatccgtatgagcttcgtcaaaggctggggagcagagtacaggtcagtgcctaagctgcctttagtggtggtagagggagccagctctaggcaaggcatgacagccaaggatagcgtcacagccttagtctagtgctcagcagctctcaagcaccatcagcatttctaggcccactgtggggacgctggcattattcttgtagagatatggaggctaaaagcttatggagagtcaggtggaaaagacaggtccagacttggcctctcctgggctgctgtgtcctcaatttccttgggatggattctcaggatgactgtcttccctgacaaggaaggagatttgagtgttttatagagaacagctaattcatgtatatattttcatttaaagaatgccagttagcactttaaacatggcaccagtaatagcaaggtctacctggtctgcttggttgaggcccctcaggctgtctagactcagtttaatgagaaggcagtctccttttcccatgctggacaggagaggtctgggaggcagggccacatgcccttctgctccatgcctcctccctggcccccagagtggagccgcacagaggtacccacacgtcagctgcagccagcgccttgcaagttcctcgccccttctcttcatttttccagatgtttggaatcggttttgttttgcagtcattctgcaccccagccaaacccatttcaatattggctccgggccaccgtttgtaatgaaaccccgatgagcatgacttatggaaagtcagattctcagcagaggacggaggtctgtaaaatctaacctcgctgtctaggtttcagagctgttgctctttcacggatgccccatggtgccagtgagcaaagtaccctgggcctttgaatctgagatccagggagggtcaccaacagctcagactgcagaataactcccagccatgctgtggtgacccggcccaaaggtctggctgggcagatgcctgagccaaccttttagcccaggatttagatcatttagggaatcagagtgaaaggttagaaaattaattctttaacgcacaaaccccgaaggaaaagaactgggaggcctgcttgccttcaggcagggggcccaggctgtgaacctcccgaactgttcaagcaaagcacttgaggcttgagggagggttagcctcgggatgatggccccaaaagtggtacagcaccagggccgcccatcttcaaagattggcagaagcccctctctagggcactgtatcaccacggaggaaaccctgccagcacaccccgtcctacccggcttactgcgtcactgccgcctggcagcatagcacggcaggcagcctagtggcgggtgcggccccttcccagaacagccatgccctcctgcattgtgggccaaacagagtaaggtttcaggctggttctttaaagcagctgtaagcgggcctgcagcctaggcctcacctccagctggcacccgtatgtcgccacagcagatagcctttgctcggtggaggcttctgggagcttgcctgtgagctgcgtcaccaagcagtctgaatttagacaaagtgctttgagggaaaagaaatgtgtggtgtgccttggtttttccagtaattgttccccggctagctctgctggtaatattttccaaaataagccgtagatgggattatagcagcaccctgggacttgaagcatgtggccctgtcagtgctttgtaaaacgccctccatcagacaggcatgtcatgacagctgcggggctggcccaaatctggaagggggctgcaggcacctacccagtggctaagctaggaaccagggagaccttaactcaggcaggaggttctacatgggggcttctcccggttcctggaaaccgaccttctttaaatctttgaggtcctctccctccagcagaacccgacttacacaaagccctcccaggaggactggtctggttcagccacatttgctagtaccacctctaggcactatttacctatctagcacaaagagagatctctgtctcggggtagcagaaagcagtgtggtaactcaacttgtgtgtgtcctcaacattttaatctctcacctcttccctcttcttccaggagacagacagtgaccagcaccccctgctggattgagctacacctgaatggacccttgcagtggcttgacaaggtcctcacccagatgggttccccgagcatccgctgttccagtgtgtcttagagacactaggagtaaagggagcgggttggggagggcgggcttggggaaaatgaccttggaagagaactccatccaacttggtcttgtcaaagaacaccgattccactcaactaaggcaccagcctgtttctgagaccacagaagaaaaccccagggatggatttatgaacagctgtgtctgctacatacacgtgcccctgtctgaaggccaagtgatggcttctgttctggtggcttgaactaacaggtggtgtatcgccacctgactccttgtttaatgacagaggtctgggatgtcacagtccaaaaggaaagtgcctttctccatggctggagtatggagtttacctttggagaagttgtaatggagcatgccctgtcccaccactctcagagagggtgtacctgtcaaactggatggcctacataggtactcccccctacccctaggatgcagagagacgggaacacgccggagggtagagctggggagaacccattcttccttggaaggatccgctgaaggtcagcgtataggtgatgtacagttcctaatatcacatcagtctcagagtgttcacaggaagcagcaagggcactcgtggagtatgtgtcctgggtgaggtggcaccacaccgaatgaatgcatctctgggagctggcaccacaaccctgatgtataggctgtgttggtttatggagacaagttgcatcaatgaattcacctagcataggctctttgaaatgtcctctgtttgataaaaaacaatcctgggtacgtatgttggctggaaaaccacaatggaccctgccactgcttcttgccctgaggtttggaagctgagagttatagaagccaattcaccaggaggtaagacatcccaggctgacatgggcaaatgaaaagggctattaaaatttttttacaccttggaaaattgcaggcttggtgcagagcgctctgtcatcttcaccctgggatgtaggattacctagctatggtaaaggattgccacagcaaactgtgacactgtgtaatgagcactgttcccagcggcaattacagagaaaacgagtgtaaattatttcaactggaaaaaagtccctttcttggctgttttagaacagggtacacaggatcgccacctgcaactggtactcgcttcttggctgctgcttctgttgtgaaaagacgagcccatgtttctgcatggatttcccatggaagtcctgtcctgctacagaggggaagaaagtgtaccctccaatgtgataaatcttctgatgcccccagactcttggagcacatcctggtgcccctcctgcaggagcctgtggcatatttccagctgggcatgctgatcctccttgagacacagatgcctgtgtgagtctccgttgatacaattctgaacccctcaggttctctgaaagggcacagaccatgggcgtgaacattgtgccgtacctgagatggtctgtggactgctgcttcagacacacgagtcctcggaactgcctggctgcctgtcacgcatgctctgagtcagaacacaccaacgctctgctgtggctcctagggaagcattcatggtcctctgttatcagcaggggtttatgtcacttgctgtccggtttcctaggggcttcctgtgccccttccccagctatcctccaggtggctagggacagtctattctgctgcaactggaaagtagagggaaccggcactgctcagagcagatggcggcttctggaggcacacagtgggagtacaccccttcatgttattggccagttgctggagaatgctgtaggagaaaattctaggcaggtctactcttggcatccctgagagtcaaaggcttggagtctaggaaaggtcacaccatgatggagaacacaggtcatttgggtatgtgtaatcaaagtgccctcccaaatcagttctccttttcgtatgaacagcatctctacttttaaagaggagttgaggatcgagaagatgacagtgcagcagtgggtgtggcctgactacatgtgctgttccagccctgggtgcccactgacaccgacccccaggcagaggcctttgtcttcagcactcctgagaagttggctctttaccccttctcctctgctgcccctccttcctgctggttcaggtagccccagccacgtgggttagagtcctgtgctggcctgccatggcagctggctaccttccagaccaactgtagagatacctggcattttgaagaaagcctagactggagagcagggcctctcttgggaaggacacaaggcgggcaaggctgctggcagacttctccactgacctgagtgtgcttttttttcccctaaatgtattgcatcaagcctcagtgcttatggagtgcagtggtcttcatcttccccaacttgcttctcagagctgggatgtattccagagcctgatgtttttattcaaaccacagaaaagttttctttaagtagcctgtgcagtcatgcatgtgcctgagttgtctggagcagaggcaaacatctgacttcattcttagccccaagctgccatttctgagtccttgagaggctgagaaggctctagctttgtactgtattcttactgtgtgactagatgcgtgagcgctttacattagaaggaacctggttagagcttgctcctcctgtctttgtgtggcatttgtgttccattaccggcccctttaagtaacggccttcacagcaccttcccagtgggtagaaagccacacaccaggatgtgggtcaaccatgaagatgtggcattgcagacgggggaacatgtggatgcatggctatcgccctgaacagtccctgcagctacttgtgttaacacagaactgatgtttagcattctgccgctttcgtatttatgtaacaattccttaaagccattcaaatggctaactatttaatttctttaggacagttgtaaaggtctctctcctgaggacaatgacttggaagaactggggcacagccagtcccagacactggtggaggctgcagtgactttttttggctcaagatccacaagcattagagtagactgggccaacaagtcaacaagtggtggcgtgtgcaaacgggctgccctagtcaagcccagtcccttcaacagtatgtctgatgcaccacaggccctccctactggaagtgggaacttcaaatggaaattggagccatcttttatcccagaagcctttgctgctgccagggcaagtgggctgttgtggactcttgtttaggaggctgaggttcttgtcactccttagccagccaggcctttagtgtctttgtaaaaagcatgtatttatagtgttttagatttttctaacttttgtatcttacagcattgtaccccattgttaaagagccgtgtcccctcttcttataaacgcccttctaataaacttttcaccgtaaagctcctgagacaggagcacagtctgattccctgctgctgtctctggggaaagggatttacaaggggaccccagcaggtcctgggggcttcagagctcagcaggtgctgataccacaacactgaagtaatacctgcccttaacaagggtaccctataggacgccctgggttccccagatatggtgctagtcagagacacatactggaatgcccctgttcattccacctgtacaccaaggctattcccctgcctccagcccctgccccgcagggccttccctcacagtcctctgccgtgctgtcactgtctcacattgccactctctttccagagacacagaaaaattacaagtcgtgcctgtgatgccattctgaattccaaattcaaaatgagatctgaaatgcatgtcaacctcaggaggtgtggagatggccaaaatactgaagagaggctcaaatggggtagcgacagatccccatcctttaggtaggcctccacgggccaccttctgccctcaggcccatctcccagcttcccgccaggtttgctgtagactttttattgtagttacctggaagggcctgtaccccaggcgatctgtgggaagtgactcagagccaaccgcctttctcaccattcagcccctgctctcggcagctcctacctgggcccccatgagtttcttttccctgatccctcaccttgctgaggctctagttgagcaaactgcccctttggaaaggccctaccagttctccttggatagaccttgtgttcccagaccacattgtgtgtgtgtgtgttcttaacagtccttcatagtaagttcatcaagccccaggctttccagccacacaaacactagtgactcctgtatcggccccgagcttccaactcaggaacagagagaggcctgctggcccatcaactgcccatgttcacaatcagaagttaccgttcccttctgcagaactatattggtagaggtcatctttgtccatggcttcccaccaagtctctgctctcaccaccatggccgcatctccaacacccagaccccgcacagcaccaccacttctctggtctcctgcctgctctcacagttcacacagtccatgttagccgtaactgtctctagagagagagatacctgaaagaataagatttgttttgactcatgagctcagacctttcagcccacggtcatttgtccccggtgctgtgggcctgcaatgaaaggaaggggaatgagcaagggcatggccccagtgattgtgtggtcaggcctatctcaaaagttcctccagctcccagtagtgccgtgagccaggaacagcccttaacaaatgggatcggtcccctttcgagggatcagggaaagaaacacggggggtgggggaactcaaagccaaacaatactgcctgcccccagtccaaggtcgtccatggaagacctggccttcctgtctctgcccagctctccactgcttgccttgttctctacagcgcagcagtggtggggactgtgccatcctctctgcgtgcctgcccgtgctcctcctctccatactgcttgtggccacctctgtaccaatgctttgcagctgccttcagttctcctcccaggaagcccttatttgtcaccatgtgtttacctgtatctgtcatcccttgcaagcagggagtccctgagagcaggcctgtatagcagtcttgcatccctggcttcctgtggcctaataggtgcaccagctagtgccctgtctggggtttcaccttagctctgtgccttctatggctttccactgtactactacagtgctagtcatttgtggaacgaaaaggaagtggccaaaacccagttccgggtcacttgctattacagctgtcccaaaattctaatttgtccccctctagttcagggataaacgagtgacacaataaccgtgaccctttacctcacctacagcaataatccatagttagtgctgagtccgctcagccagagaatcctcagtgcagcgagctgatctgatatgcatggtcaaggttgctgctaccaggccttcctggaacgggtgaagaccctttgtgcctagagcatcttagtcccttgggacaggcgagcatattcgtttgggctttcatttctatacctgttcatgtcatgacttaccatgagaattttcatgtctccacttacctgtgtgcatgaactctttattgcttttatctggactccagcattacttccccgggattctcaaagcacaccccaggagtgtcagtatcacccaggatggtacaaatgtggcttttcaggtcccaccatacaccaactttatcagatatggggtagggcctgttctgagttgggctcgcatttggaaacagctgtggtgtaagctggtggtaactttcttcccattctgcttggccttctgtcacgtgaccttgtcttgcttgcctcttactcccctctgaactgaagtctgagctccaggagaaaagaaacatcatcctcaagaccgactcctccgtcatgctcgctccgatgccggcaccaagagtcacaggtcatgaggctggttcagccttagcagggttcaaagtcaagttgaagcaactgaactttgctaatgatgagtgtctggaggtttcctagggagtgtcattaatgcagtccaagtccttaaattcaggttaaatctatgtttcttcccaccaacactgttatctttataaagcacagatcctggacatcagtgagctcacacctccgtagcattaaagccatctgatggccacttctttcccaaggacagcagagaggctcctggttagcaagctgagctggagtgtctgctgcccagcttcttggtgggtgagcatgcacgggcgtagtacacttgccacccgagctctcaagagcctgaggtaagaggactgaacactgaaggcctgtgtggcaaaactacatctcgaaaacaaaagaaacgggctggcaagatggctcagtgggtcaaggggcttgctgccaccactgatgacctgaattcaagtctcaaggacccacaccgtgaaaggagagaacaaactccttaaagttgtcctctgaccttcacatacaccaagtggcacacatgtacacacacacataaataaatgtagcacacacaaaggctttaagactcccgctccccatacacacatgtacaccaagcaagtttgtatgccaaagatagtcataattttaaggccaggttttgaatctgtacttttccataaggagggatgggggagtggaactgttcaatcactaggacacaggaaatgagctgcccagcattctgaggatagatacacatgactgctattaactgttcattccacacaccagaggaacaaccagaatcaagcaagatgctctcggcactggaacctacttccctcatagttagggtatagagcagctccgtggagaacatgagactcagtgtgtgcgcctaaggtgtaaggcgggtcactgagcagagccctgccttctgctctgtggcagcacttcactgcccaggtacacaaaggggatgtcaacttccagtctgagcagcccacgagcccgagcactggggaagatgattacattctctctccctgtaggctctgagactgttagataatgatccaatgctcagttgtcccctgtagacgggtgtgtgtgtgtgaagagcacgtctggtcatcagcgcatttgcttaagctctctccttcaagcagagctctaatgaaccagaacccctctccattctagacacttgctaaatttagcttaacagcagcaaacacccaccctcaaaatagtccctagagcccatatcttacccctccaccatgactctcctgcttacacaagggtaaggggccatgtttcatgctctctcaatggtcactgttaagagaccatcccaagagcactgattcctcttccagaggacctggaatcagctcccagcacccaaatggcagctcacaaacatctgtaatgccagtcccagacgatccaactccttcttctgacctccacaggcaccatgtggtgtagtcatacctgcaggcaaaaatggcaaaacacccatacatgcaaaaataaatttaaaggagactatcccaaggaacatgataaactgtcaagacgttcctcccagctctccacagcgggagggtgacagtaggcacacatcttcctcttgttcggagcagttcacaggagaggcctggtgtatgcctatgatccttgaaccacattctacattgccccactatttaagcccagcttccccaaatctttagtttctctagatcagatgtggccaagttctataaatagagagcaagccagctggttctgtcaaccttctcattctctgccatattttcaaactgtaaaaatagccttgctttcatcactttgaaatcattacataatatgattgtttcagggaagaaaaatttgactctcatattcatattctctctctctctctctcatttctagaactcatggatcttcagactctgtgatcatttccaccaagcagattgtacttgtcaacaaaaattgtggacctactatgtgccaagcactttgttacagaaacaagaagtatttaaggcagaaaaccagtttcttaccttcagtccccccggaactctaacttatgtgcacataagttagacaacacctatcaccacagcaccagctcaggaatatataggcaaagtagattctgaaacattacaggcaacaaactcttcggactgtatgtctactacaaaagacaccaggcttccaccaactcacacctcttcccaaacagaacaaaacacattagcagactttataaataagtcatcttttaattacttgggtttgtttagtcagcaaaatcaagtccacagccttttctagtctattttttccctaatcatgtgacctaatatattttctaaaatcttccatattttaagaaaaacaagttctacctttctggcaacccacagccgacttccctaatttcccttcttaaccagtagcgaatgcactcacattaaagtattagtccccctgaaaggctggtggtaaacccaagctcaaagcttacaagatcagaatgtggggagtgggaacccaggaacccggagcaaagcagcacccactgtttctagaataccaccatcaccaggatcatgcctcctccctgggttggttctggcctggctaagcatgtttcaggtcctgtaagtggtacccaagcaggcgcgtcttgtttctggtcatgacctaagtcatggttgacactaagtcaggccagctctcagcccacgatgagtaccatgtacatggctgcatatccttagagacccatgacaatgcaggggactcaagcctgcctcacagaagtgtctgtgatgacagactacgcacttttagaccttttcccctcttttcctttagaactttgctctgtgctcccctggggctgggccctggagtatggagaagccaatagccctggaagtgaaccatgatggtggctcaggacctggctgtcgggaggctcacctatccccccactgcttggaactggtgccttgacagcaacctctggcttccaagcagaaagaaggggagacctgctctgaaacctcacattgccagggagaacactcagtggtcgaagagcacagctgccagtgtcagcagtgtgctcagaaccaacactgctgctccctgggtcctcaggagggcactcagggcccttgcccagcagtggggagaggggagtttacattccccagaggaggaaactttcacctctgtttcttatagagacacacctggcttttgctgctttgtggcaggaactcagacactgaacttactaaggacttactaagagacaaacccatgagccacctgttccctatcccctaggcacatcctacatctacagctgcctttcttgtcaccagcattcaccttaggtcagagctgtgctcttggcggggaccagtgacagtacacagccgatagcacaagctccggacctgcagacagtatgaacggggcaatcgagcacagcagcagaactccccatggagcccaggctggcctcagactctcagtgctgaggtcacagtgtgctctctgacacttggttctcctgtattacacatttccgagcctcattttacccaggttcttaaaacgaagactgtagatctgaagggtttccacactgtcatttcactcctcagtcacttatgcggcaggaacaaagatttctccctaacgcctttctaaaagctcaggtaagggaccccaaaaaccagtcaggtggccagcgtgctagtggcaatcttggcagaagagaaccccgttgagaagggaagcacttggggagcacggtgctggcactggagtcagtcaaacctagcaggaagagcttagtgctcgtcatcagaagaaaggccctcgatctcatctcggtcccctcctattgccatccagaaggctttggccacctgtggagggaagcatgtgacaaaggtcaggttagttggtaacagctaaccttcagctcacttcatatgccacacccaaactgactaaggtctacacttctacacttttcccctccaaccacacacattaaacccccgagcagcctttgacccagacttctggatgcgatcagggccgtacatgcgtgtgaagggtagggatatgtttggcttcattcctgacagaaccaaaaccaccagtgcgctgctggccttagtgtccggaaaggagatggagagatcggtgatgacacagtttatataaggagatgtcaccgagcacgtccatttcctgacgagaacatgtattgctctggaaatgaatagataaaacagcgaagagctccctggcttaacaggaaggcaagcatgatgcctctgtgaaggtcccatgtcacgtaacatgcacagacagcagcacccgtgttactgttgcacaaatagccatccagctggctgtaatacccagggcacagcgcacatcagagcctcttacag

SEQ ID NO: 2295 - DNA, 2100 bp, Mus musculus
gtccggggcctgcccgtcagtccgtcggtccgcgtggagcagctcgggcgccgccgtgctcccgatccccgcagctgcagcgccgcagtcctggcccggacgcccgggcaagttctccagagttaaaagcgaagttcgggcgaggcgcgggccgagctgcctctgagcgcccccggcgtccccagtgcgcccagccccgccgggggcgccggtgacccttcggtgccagccatgtcgtccatcctgcccttcacccccccgatcgtgaagcgcctgctgggttggaagaagggcgagcagaacgggcaggaggagaagtggtgcgagaaggcggtcaagagcttggtgaagaagctcaagaagacggggcagttggacgagctggagaaggccatcaccacgcagaacgtgaacaccaagtgcattaccatccccaggtcactggatggtcggctgcaggtgtcccatcggaaggggctccctcacgttatctactgccgcctgtggcgatggcccgacctgcacagccaccatgaattacgggccatggagctctgtgagtttgccttcaacatgaagaaggatgaagtgtgtgtaaatccttaccactatcagagagtagagacgccagttctacctccagtgttggtgccacgccacaccgagatcccggccgagttccccccactggatgactacagccattccattcccgagaacactaacttccctgctggcattgagccccagagcaatattccagaaaccccacctcctggctacctgagtgaagatggagaaaccagtgaccaccagatgaaccacagcatggacgcaggttctccaaacctctccccgaatccgatgtccccagcacacaataacttggacctacagccagtcacctactgtgagccggccttctggtgctccatctcctactacgagctgaaccagcgagttggggagacattccacgcctcacagccatccatgacagtagatggcttcactgacccctccaactcggagcgcttctgcctgggcctactgtccaatgtcaaccggaatgcagccgtggaacttacaaggcgacacattgggagaggtgtgcggctctactacatcggaggggaggtctttgcggagtgcctcagtgacagtgctattttcgtccagtctcccaactgcaaccagcgctatggctggcacccggccactgtctgcaagatcccaccaggctgcaacctgaagatcttcaacaaccaggaatttgctgccctcctagctcagtctgtcaaccagggctttgaggctgtctaccagctgacgcgcatgtgcaccatccgtatgagcttcgtcaaaggctggggagcagagtacaggagacagacagtgaccagcaccccctgctggattgagctacacctgaatggacccttgcagtggcttgacaaggtcctcacccagatgggttccccgagcatccgctgttccagtgtgtcttagagacactaggagtaaagggagcgggttggggagggcgggcttggggaaaatgaccttggaagagaactccatccaacttggtcttgtcaaagaacaccgattccactcaactaaggcaccagcctgtttctgagaccacagaagaaaaccccagggatggatttatgaacagctgtgtctgctacatacacgtgcccctgtctgaaggccaagtgatggcttctgttctggtggcttgaactaacaggtggtgtatcgccacctgactccttgtttaatgacagaggtctgggatgtcacagtccaaaaggaaagtgcctttctccatggctggagtatggagtttacctttggagaagttgtaatggagcatgccctgtcccaccactctcagagagggtgtacctgtcaaactggatggcctacataggtactcccccctacccctaggatgcagagagacgggaacacgccggagggtagagctggggagaacccattcttccttggaaggatccgctgaaggtcagcgtataggtgatgtacagttcctaatatcacatcagtctcagagtgttcacaggaagcagc

SEQ ID NO: 2296 - protein, 458 aa, Mus musculus
KRSSGEARAELPLSAPGVPSAPSPAGGAGDPSVPAMSSILPFTPPIVKRLLGWKKGEQNGQEEKWCEKAVKSLVKKLKKTGQLDELEKAITTQNVNTKCITIPRSLDGRLQVSHRKGLPHVIYCRLWRWPDLHSHHELRAMELCEFAFNMKKDEVCVNPYHYQRVETPVLPPVLVPRHTEIPAEFPPLDDYSHSIPENTNFPAGIEPQSNIPETPPPGYLSEDGETSDHQMNHSMDAGSPNLSPNPMSPAHNNLDLQPVTYCEPAFWCSISYYELNQRVGETFHASQPSMTVDGFTDPSNSFCLGLLSNVNRNAAVELTRRHIGRGVRLYYIGGEVFAECLSDSAIFVQSPNCNQRYGWHPATVCKIPPGCNLKIFNNQEFAALLAQSVNQGFEAVYQLTRMCTIRMSFVKGWGAEYRRQTVTSTPCWIELHLNGPLQWLDKVLTQMGSPSIRCSSVS

SEQ ID NO: 2297 - DNA, 145199 bp, Homo sapiens
accaaataaaattggaaaaaacctcactgtccaagtgtgggaaactgatttaataagttatggtaggctggatgcagtggctcatgcctctaatcttagcactttgggaggccaaggtaggcagattgcttgagcccaggagttggagaccagactgggcaacagggcaaaaccctgtcataagttaaaaatataaaagattagctgggtgtggtggtgcatgcctgtagtcccagttacttgggaggctgaaatgggaggatcacctgagcccagggaattcaaggctgcagtgagctgagattgcactactgcacttcagcctgggcaacaggagtgagactctgtctcaaaaaaaaaaaaaaaattatgggagatccatgtgacaaaaagctctacagactttcaaaacaatgtaggaaatacgtatgtattgacatagaaagatattcacaatatgttaaaagaaaatgcaggtgagtgcaatatgattatttctagttagtggctgttttttgtcttcattgtggttaagagcaaggacttaggtgtagcaggctgcctggattgactgggcacagccactccctggtctgaccttaccatgctcagtgccctcttctgaaaagggcatgataataacaagaaccacaagcagtcgtgaaaaccaaacaagtgaatctaatccatagaagtgttgaaaatagggcctagcacttgtaagacttcaataggtgctaaccttcattattttttaaaatgtcattagtgagatataatttacataccatgcacttcaaccatgtcaatcagtggcaggaagttctcatgggctgcagatgctgggctgtaagtaaggtgcagactattccagatgcgatgttattttacgaggtcaggattccactctttctcctgtcacacacccagggcctgactacactgaagcactaacaggccctctctgaaggccagtaacacgttcacgcctgacccgaaagtgcaaatcaccattgtctccttctgtgccactctacaacccatgtttcacacactggagacacctgacactgcttttgccctacacatttttttcttctctctctttttttttttttttcagatgaagtcttgctctgtcaccaggctggagtgcagtggtgtgatctcatctcaatgcaacctctgcctcccgggttcaagggattctcctgcctcagcctcccaagtagctgggactacaggcacccaccaccacacccagcaaatttttgtatttttagtagagacagggtttcaccatgttggccagggtggtctcgatctcctgactttgtgatctgcctgcctcagcctcccaaagtgctgggattacaggtgtgagccatcgtgcctgacctccttctctttttaaaatctgttttttcactgagttataacttttatacagtataccctatttccttttaaaatttattttttttaaagtgtggcccaatatacataataaaatttaccatgttaaccattatgaagtatacagtacagtgacattatgtatattcatccttgttctgctctcatcacaccatccacctctggaactcttttcgtcttgcagaagttctgtacgcattaaatactaactctcatcgcctcttacccaaccctctggaaaccaccattctactttttgtctctatgaatttgtttatttattcatttattttgagatggagtctcgctctgtctcccaggctggagtgcagtggtgtgatctccactcactgcagcctccacctccagggttcaagctatccttccgagtagtagctgggattacaggcatgcactactacacccggctaatttttgtattgttaatagagacggggtttctccatgttggccaggttgatctcaaactcccaacctcaggtgatcctcccgccttggcctcccaaagtgctataatccaaagggattataggcatgagccagcacgcctagcctgtatttgactactctacatatctcatataagtggattcatagaacatttgctcttttgtgactgatttatttcacttaacatggtctcaaagttcattcacactgtagtatgtgtaagaatttcaacccttttgctgggcgcggtggctcacgcctgtaatcccagcattttgggaggccgaggcgggtggatcacgaggtcaggagatcgagaccacggtgaaaccccgtctctactaaaaatataaaaaattagccgggcgcagtggcgggtgcctgtagtcccagctactccgtgggctgaggcaggagaatggcgtgaacccgggaggcggcgcttgcagtgagccgagattgcgccactgcactccagcctgggcgacacagcaagactccgtcacaaaaaaaaaaaaaagaatttcaacccttttgaaggctgaacaatcctctattgtatgtctatatcatattttgcttctccatctgttgacagatgcttgggttgctcccgccttgtggctactatgaataatgctgctatgaacaggggcatacaaatatctgtttaagcccctgcttttagttcctttgggtatatgcctctgttgattttatttatttaattttttgagatggagtttcgttcttgttgcccaggctggagtacagtggtgctatctcagcttactgcaacctctgcctcccgggttcaagcaattctcctgcctcagcctcctgagtagctggtattacagacatgcaccaccacgcccggctaattttgtatttttagtagaggcaggggtttcaccatgttggtcaggctggtctcaaactcctgacatcaggtgatccacctgccttggcctcccaaagtgctggaattacaggagtaagccactgtgccggacctctatacctctgttgtttttaatgtaaaaataacatgcctctattatttttaatgtaaaaaaataaaaataatttaaggtcatacactctcactgcatttgtagaactctattttcatttcaatgcatcctctctggtggctgttcatatgcaggtatttttaaaagtaaatgctactataatgaaccaacaattttccaactactcttttttatgtccacattgctaacagaaccatagaccatgggcctgagccaagactgatttgtgactttattatcttggaaaataggaaacggaaaacacagtgacctctataaacatatatacgtacatacaagatgtacgcaaggacaaaaacatatgaattcagagaggaaactcacacaacatgtacccgtttcacttaaataactggggctggactttgaaagaatgagatgtgaacaagacctcagaggcacaggcagagacatcttacatgcacacacatgtgaatctccacaacacccctgtatgcatagagagtgcaacacaccaggacacacataaatggtaaaaaataaactcatacacacacaacctcacacttaccaggatcttctccttgcccccaactcccagaccggcaatttctgaaggctgggaaggagatcctgcaagagaactgaaaatagctctgtgaaccctgccctgggctccaagtgcccgcccacagccctgtcccatgctcccagctcagccttggccccatgcctcggtctgcacacagccccaagtccaaccccctgccccaaatctttctgagtcagacctgctctctctcaatactttccttggacagtacctgtatccagctccttctgtcatagtcattctcccaaggacactctgtaatccacgccagaaattctgctgtgggctttggggacatagggacccacgctgggctagcagtaaggggctggtattccacggccagtcaagcttgggccaacaacagctgaactgcctgcctctctggtccctcctccataaagcagcaatgcaacaatcatcttgtagacactgagaactttaaacatgaccacatccttgaagtcccaagcccagtcctggcatagggcagccccacaaatggtgttaatctcctgccctctgttccctaagctgtcagatagggcaacgcctaagcctgcatgttttaggggttgctgtgagacaggaatttttaataattttgactaagttctccacatgtaagatatcatgaccaccgaactgaacagtgctggaagccaaaggttctatctttcgaacaaactagagagcaattggtctattgactaatgtatgttgaacactacgttagagcagtagggtaaagttagccacactcctcagttacacacatcagtcatacacacctgaatgcacttatttattttccctctttagccttatcctctattctcccatacacccacactcaaacatctattctactctgttcaatatttaccattttattcccactttatttatttatttagagatggagtctcgctctgtcaccaggttggagtgcagcggcgtgatctctgctcactgcaacctctgcctcctgggttcaagtgaccctcctgcctcagactcccaagtagctggtattacaggctcctgccatcgtgcctggctaatttttgtatttttagtagagacaaggtttcaccatgttggccaggatggtttcgaacttctgacctcaggtgatctacccgccttggcctcccaaagtgctaggattacaggcatgagctaccgcacctggcctattcctactcttttattatggtaaaatgtacataacaaaattgactattttaaccattttaagtgtacagttccatggcactgactgcattcacattgttgtacaaccaactccaccatccatctccagagttttttcatcttcttcacctgaaactccatatccagtaaacaataattctccattccctctccctttggcccttggcaaccactatctccttcctgtctctaagaatttaactatgctaggtacttctgtaagtggaatcacacaatttttgttcctctgtggctggtttatttcacttagcataatattctcaaggttcatccacaatgtatcatgtgtcagcatttccttccttttaaagctaaataatattccattgtatgggccaggaacagcggctcatgcctgtaatcccagcactttgggaggccgaggcgggcagatcacctgaggtcaggagttcaagaccaccctggccaacatggtgaaaccccatctctactaaaaatacaaaattagctgggtgtggtggcacatacctgtaatcccagctacgagggaggatgaggcaggagaatcacttgaacctgggaggtggaggttgcagtgagccaagatcgcgccactgcactccagccagggcaataagagcgaaactctgtctctaaataaataaataaataaaatttaaaaattccattgtgtgactacaatacatcttgtttttccacccatccattgatggacacttgagttacttctaccttttgactgttgtgaataaggctgctacggacatgggtgtggaaatactcgtagtccctgctttcaattcttttgggtatatccccagaaacagaatgaccggatcatatggtaattctgctcagttttttgaggaactgccatacatacaccacagcattttcctcagaggcagcactacttcacatcttcaccagcaatgtgcaaggattctaatttcttcacatcctttccaacatgttattttctgttttttaaaagcgaatagctggccaggcgcggtggctcacgcctgtaatcccagcactttgggatgccaaggtgggaggaatcagctgagatcaggagtttgagaccagcctgaccaacatggataaatcccgtctctactaaaaatacaaaattagccaggcgtgggtggcacatgcctgtaatctcagctactcaggcggttgaggcaggagaattgcttgaacccgggaggcggaggttgcagtgagccaagatggcaccattgcactccagcctgggcaacaagagcgaaactccatctcaaaaacaaagaaaaaaagataatagccatcctaatggatgtgaagtggttcaatgtatatctttttatttgtataacttctttcaaaatgtatataattattttgtgtatatgtaatttgttttacatagtagcattatgctattcctttccctctgtgtcttactattttctgttggaactgtgtttaaaatctatacatttgttttatgtacatggaattcattgcttctcacttttgcatagcactttatggtatgcatgaatcacatccatgtatattgagaacctactatgtgcttgtaccaagctttctatatgatttaatctgattccatacagcaatcctaagaaggtgttgtaattatcacattttatggatgagaaaactgacacacacagagttaaggaacgtgcccagagtcacacagccggaagtggaagaggtagaagtttaacccaggtcattctggtgccacagaagagctcacacgtgtaaggtgttacaaagagctataggtagagatctgactgtagacagaggctctctcttaggtgagggcactctgataaaagttctagtcctgatttggctacttatcttcacagtgcaaatcaccttcccttacagacatcactttctgtctgtgtaagatgaagatgattttaatgctttttctagattcactacttgttgattaaatacccttaagctaatgggaaaataatcagaattgaagtcaggtgtttgtttctttcgtgtatttggagtggctggcctacctgggagccactccaaatacacgaaaaccctctgatgtgtctattcacgaggtgaactgttcataggatggactattcccagggaaacagttgctgtctccacttccatcccacctctcctgaactttgcacttaccatggtgaaaaattaactgggctaatgtttccctcccaaggacaacctctgcaaaagcaggtatggctgggccccaaaagaccaggtgccagaacagagttgtacccatccagagcagcccacccattcactgcccaaagtcaagatcaagagaacatgcagggtcttctcagcactggaagaatcagttcctcagccctcctcagagctttctgaaactggacttagtcccccagtggagggacttctcttggagaaacaggcctgaggagaaagaactagcccagaaatggcacttattagacttgtaggtgggtccagcactatttttctgcatgcacagctgttcttgtcacacggatgccagcagggaagcatggttctgccacactaactagctggctgcctagttatttcctcccctcaggaaaatgagagggctgaatgagggccccttcccataccatgattttacagggtgaagtacctgtcaggtccttctactacatgtaatcctcaaatctctctgacgctcttcctctacagtgcaaatcactctccttcagcagacattgctctctctgtaacataaaggacttgaactacaggaggacagttacaatgctctttctggatccaccactctgcacagtgagaaccgcttgctccattcttacagcggagagaacggacgctgcccaaggggaagaagagaaagagccgggattggaagccaggccagtcactgatggatcctgagcccctcttactttctttggctacctctcaatggttggacttgttcaggttaagattaacactttactggacgatgatgactgcaaggcccctgcccatctttgcccactcagtcacatcatcctcatccccaccctttgatgcttctctaggctgtgaacgccttgaaaaccttagtcttttattttggaagttcaggaactgaataggagggctgcaactcagagctgctccgtcaatgtgtgttaaacttatttgacctccctccaccacttttcatggcattagcaatgcaaaccttttcacatgagcttcccacagccaccctaggagatcgcgagggaagctacctctagccccattttacaggtgagcaaataatccttgcagtgttacaacagtgtgcccgtgtagagaactgttttgcaaagagctcgatcaatgatgtcatctttgccttccgtgacccaggcagctgggtgcagtctcaagatcggagactgaggcttcaacaaagtattgggttcaaattccagctctgccacttggaaccctgagtaagtaatgtaatctctctgtgcctccgtaaacgtgaggcacaggaacatctacctcaccaaccactgttaagactgaatcaaagggcagcaggcggactacccggaatgaagaaagcaatcaataaatgtggattgtgtcatccttgtctctcttgacggacgggaagaggagagtgaaacctaagaccacagcggcagcgcgttaacaggaggaccagcaaggaacggaagccaggttgtcaagcctcagttggctttcacgtattctccttttcaggcgggtatttaggaagagaggagggtgaggagcacagcgcacttctgcagcagcagctgcggattggcttgtgggaggcggttctccggagcaaggcaagggcccctgccgcttctgggctgactgtggattccgccacacctcacagggctttgtaactccccacccacttgagggttccagataactttttttttttaacaaagcaggggtgggggtgggagattcctgctgttaaaaacaaacaaagggcttagacaccggctagtcggctgcgggaggcagcaagagaaaggccgaggggcctggagtagctcctgaaaaccgccgagggccctgcgggcagacgcccctgaattcttttggtggggagaaaagccgcggagctccccaatgtgccaattggtttgttgttgttttgctttttttgaatacacaaactctccgaaaactcctgtcttgccccacttttttgtgagttcattgctttggaaacaaaactctcttccatttattggcaattatcaaatttccgatccttctctatcaggagatccagcaacaaacaccctgttatgtaaatttctttcaaagataaattcgaaagcccctccattcattccttcaagaactcaacagatgtccttgaggctcattttctgccgggcactcggttcacaaggctcaagagacccctggctccagccattgtccaggttgtcactggtgtccccagctctccacttctgaggacccacttctcaccccctcctcctccgcacacgttcccgaggctctcggccggtgtgatctcaccgactagagaataaaaacagcccaggggcgccggcgccggccaagggccttgacggggatcagcaagcgcgaggccaagtgcgggccccaacttcctgggcccgggccttccgcgcgccccctctcgggctcgggtcctctccagggtgcactcgcgtccggacgacgcttacttgctgcgagtccaaccctctccggcccgcaactccaaccgagccgcccgagtgtggactccgagagcggacgccacgggccgcgctcagccctcccgcccgaggcccctctcgccgtgtttcccaggacttcctccccgcgcccgcccgacttcaggtcggggccgcgcagggtcccgcgcgctccagccaggactgccgccgcccgggtcgcccacgtgggcgtgctgggcgcggggtggtggccggccgggcgccctccccggagcagggggcgggcagggcgcccgggaggaggtggcggggcgcgggggaggaggcggggagccccggcggcgagggggcggtgacagcacttggaaaggaggctgcacgcggatttgcatgaaacacagactgggagcgggcgggagcgggagcgcggcgcacgccccgggccggcccagccagcgagcgagcgagcggcgagccgggaggaggagggtggcggggcggtgaggccgcagaggcggagggatctgcgcatcaaagctagcgaggcgagcgaagtttggccgggggttggactttccttcccggaggcggcacccaaacagctaccccgtgcggaaacccaaacttctgctgccacttggagtctcgcggccgccgcctccgccccgcgttcggcgccttcccgaccctgcactgctgccgtccgcccgcccggccgctcttctcttcgccgtgggagccgctccgggcgcagggccgcgcgccgagccccgcaggctgcagcgccgcggcccggcccggcgccccggcaacttcgccgagagttgaggcgaagtttgggcgaccgcggcaggccccggccgagctcccctctgcgcccccggcgtcccgtcgagcccagccccgccgggggcgctcctcgcgcccgcgcgccctccccagccatgtcgtccatcctgcctttcactcccccgatcgtgaagcgcctgctgggctggaagaagggcgagcagaacgggcaggaggagaaatggtgcgagaaggcggtcaagagcctggtcaagaaactcaagaagacggggcagctggacgagctggagaaggccatcaccacgcagaacgtcaacaccaagtgcatcaccatccccaggtgggggcccgcccgggggggacccggggtcacgccggcccagccccctggcactgcggggccgacccagtggggctggagatgggaagagggagagagagggagggagtgagactgtgtgggtgcgtgtgtgtgagagtgggagagcgcgggcaggaagggggtggggggaccccaaacaaaaccatctctgatttgcaaagatcagagcccgaggcttccacgcggcactctggcttccacacctcacattccctttccacctccgggaggggagagcgggttgctgcgggactcggccgcccccactccggggagctggggctggaagttgaggcccgctttgttcggctccgcgggccggagcccctcctccgccgccgcctcccgcccccgcggcccgcgctcgtggaggtggtggtgtctttgcgtttcttttcttcagtcgggtctccccactttcctctacaggaatgcggtccgtacagctggggctgtgggtgaggagcgggagcctagtgattgacagattccttcttcgttctttctttgccttcgggattagcatttttatcgagtatttttagactcggttgtgccagtctcccgccccctgagcatgcacgcactttggttgcagtgcaatgctctgacttccaaatgggagagacaagtggcggaaaatagggtcttctcccacctcccacccccccatcccgactcttttgcccttcttttggtccaagagattttgaaaccgtgcagaacgagggagaggggcaggctgcagccgggcagataacaaaacacaccccaaagtgggcctcgcatcggccctcgcattcctgtagagccttccttcccaaagcgcgctgccatctgtctggatctcctttatccttcccgttgcgcgctagctaggtcgggcgggagcccacagatggctgatagaaggggtcagtgacttcactcccccagggccttccttagcttagatgtgcctggctgggaactgggggtgcgggtaccttggcttcctgtctctacctctcagcctcctttgatgctgaaccaagggagagagcgtgtgtgttgggggctggctcttttgggggtcccaggctgccgaggaatgagtagaaagcaccagggactgtcagccgcaaagggattgtcatccctgctcctgggccagggtggactccatccttggccacctgcttggggcagttgtacaggggctgccaggcgagtcaggcaggcacaaagcaacatctgtccacgggaaccgagggcaggcctcccctggaaataaatgccacatatggtgggagtgcggacttaaattttttttaactgggtggatccagtcaataaagggggagggaaggcggtgtgctgtctggggaagtctctgggcgtgtgatcgggagccagaattgacttcagaggaggtggtgtgatgtgatggtcagagagacctgggatttggttccagctctggttgttaattcttctgtattccttccgtgggggtggctagggtagagtgggtgagtatgctacttctctttctggggaggggtctgccaaacctaccttctccttatctgcctgggtgcattgaagacaagtgctttatgtattgaaacagaagaaaaaaagtggtatcaattgtaaaacaggcagctgtgaaaagtgtttcacagtttacaaagcactttcacatggttttctgaggtcctcaaaaaaagacagaaagcaagcaagcaaccagccatggaaagtagataaggttgttaggcttaagattatcacatttttaaagcagaggaaaccttaaaagagagaggtgaaaaggcttgagtcatagacatggggttctgcctgaatgtgctctttctgctgccccatgctgctttatactttgaagatcctgaatacattctttgctgaatgctaaagctgtgttagcttggggagggccctgtggatctttgtatgtgcggttgcttctttaatctttgggctggtgatagcttggcagagaggccttgctttcccttgccttggtaggagtttgtcctctgtggggccatacctttggcctgccttttcctcttccaaagtcctgctgagactttggaagcctaagacgtgtgaacgctttggatgattctgagagttcaagccaacctgccctgtggccttctcgtgactttgttaggactgaggcatcttctgcctgcctggataggactgaatacaaaagtagattttttttttcatcttttttttcagttagggaaacccagttgcttgggtggatccagacaaaatggattttcatccttggattttgtgcccacgcctctgggtcaccttgtgtcccttggcaacagctgctgctgttttggtcgtgggcagaaaactaaaggccacgtcttggggaggtggctggtttggccctgtgctggtgatatcaatgtgtctgctaagccccatagattgcagtgttgcttgtcaaattgtctgctttcaccacaactgccttttagtttggaaagtagagaaaggaaaatgtttaacttagtcattccccctgtgtgtggggggttggtcactgggtgcttaaaaacactctgcaagatctggactccggggtttaaggagccctcagtctaaggagattaagccaagtgtgttttggctaatatataatcatgagcagcaacagcaacatttggcaattagagctgtatactagggacttccagaccacaggcttgcttctctgtgacaccagctctgacttgtttcaattatcaggggagctggcgtgatacacacttatcgacataaagaaggtgaaagagattggtgccaaggaagtggtaagagcttcatttagatacaccaacaaaggggctgtcaggatactctgaggtctggcaggattggcagaatttacacaagttttataacagcctctcatgcctcacctgcttgagtacctgagtaaagctgcaggtatcttccttgccagtttataagaatggaatcaaagcatttgccgctgaatgagagttggtgtgtgagcgttatatgaggaataaggagctcggcacacttaaaacttagttttctggtagacactggtagcttgtacttccaccagggaatccatgccttggcctcgttgttgggagctagaccaagcttaaagcattgcttgtttggaagggaatttgggctttcttgtgtcagagcacccagtccagtggaaaattggagaattgaagcaaacactaggtctgacacacagcatctactccctccctgtgaatctgatgttttttttttggagacagagtcttgccttgttgcccaggctggagcgcagtggcatgatcttagctcactgcaacctctgcctcccggttcaagcgattcttgtgcctcagcctcccgagtagctgggattacaggcgcccgccaccacgcccagctaatttttgtatttttagtagagacggggtttcaccatgttggtcaggctggtgttgaactcctgaccttgtgatctgcccgccttggcctgccaaagtgctgggattacaggcgtgagccaccgcgcctcaccgaatctgatcttttactgtagcctcctcttattatctccttgacttttgccagggtactctcactttgagaaaggaaaaagatcctagtctttaacatgccttttccagatttctggggatagacctattactaaggctgtagaggcctcccttttctcttggctgcacttcagagcaccatgcccgtgtggcccattggaagcaagcccccttccagctgctagggaggtggtccattatctctttgctcttgttaagtttgattaggggagttccacgtagggcctgagaagaggaggtgcctgcaggacaataggtagctgatgagggatctgactcagctgcagctgaacctaggcgccacttgacgttccctgggaacatttagaaccttggaacatgctgcttgcacctgggagtggaatgtttgcagacagcccctctgttgttacagggctggattttgttgatttattgatatttattggaccctcccatgtctgagtcaattttttaggtaccagaggaggatgcagagacacgtttgagaagctcccagcctgtgagaagcttacacatcagtaagggaaacatgaatagggcattatttgagtatctaactgctatctctttctcattcccagctaccagtagaaatatgagatctagtatggatgatttttgatgggggcgggcgttgatgtgccttttaaatattgtagaattcactatgttaggaaataaaataatgacaggcatctgtttttttctgaaaaaaacacaaaattcaggtcctgtacctgccattttaccacctgcaaggatttgggaatccatttaagtttcacagcttttatatctgcacctgtcaagtcaggatgagataagttctgtggaagtgttttgtgaaccagagaatttgacaggtatgttacgtttatacttcattctgcatcattcattcattattgaattattcagtccttcgttgagaacatactacaatgaccacagcagggtccctgtactcaaagagctccctgtctagagcgggagacagacttgcccaaaggtatgaggcatgagctgcagctgaggaatgtgctaagtgcccagcaatgtggaaacacagttaattctgtgggaggaggtgtagagaggaggagaacccatgagaggtggaaaactaagaaggggacaagggttatccaaaggaagctttttggactgcagtatgatgttgggaactttttggtacatggggatagttccctataagaatgaggacgtctttatcctcttttactaaactgagtgctgctataaatatgttaccttgtaactggcactgaacagctagtgacttgggtgctatattttactccactgtaaagcattttctctttgaagtaaaaagtaagttagtactgcaaactgaaattcaggtttccttggtgggaacagggactttagatgtatcagctcagaatatgacagggagtgttaataaaaagtggacaacttggctgggcacggtggctcacacctgtaatcccaagcactttgggaggccgaggcaggcggatcacgaggtcaggagatcacaaccattctggctaacacggtgaaaccctgtctctactaaaaatacaaaaaaattagccgagcttggtggcaggcgcctgtagtcccagctactcgggaggctgaggcaagagaatggcgtgaacccaggaggcggagcttgcagtgagccgagatcgcgccactgcactccagcctgggcgacagagcgagactctgtctcaaaataaataaataaataaatgaaaagtggacaacttgcagatggttgttttgaaattcaaagcttcggtgtgacctagcttctcatttctctagttaacacttgctgagaataaatcctagacgcctgagtttctgaatgaacataggtgcttttagtggtatattttttaaaaagtctttgcaagggtgaagttttaaatgacaattttaataacagaaaaatatgaatacagtcgcatttaattctgatgagaaatgcaagaagttgatgaaattgaaagaatttgtttcaagcttatcacatcaggaatccaactaaatgagttaaaaaataaatattggtttaataatgtaaacatgtgattgctgtattattataatggaataaaattaacacgatttaatgaactgagcgaccattaatttttacttgttaatttattaggagattttaatgccatttgatgcacagtacagccattattctgcgtgagctccttaatgaaataaataagaccaagcagggcttgcttcaaattggaatcagctttcattcctgttaaccttattctcccacctttattcacctctccttcagcttcctgtaattgcaattaagttctctaagattggaatgcagttttcttaatcagcaagtctcatcaatagtcctaattgacttttgcccttttctcctttgccatattgactgattaaaacaaaagcaaaacttaaagactccattccctcccccaaatccccatctcatagtgttggttggctggcaagagaactgcccaagaaggctgctcatgatggcagcctgctgaatgtgcagggggtggaagttcaccagccatgtgcagacgtgaatggctggtgcagtgttggatgggactaactcctccctaaggaggggtatgaccttctgttggcctctgacaagtccctgagccatggagccttcagtcttcccatcttcaagcacaatggttcctggaaacagtgggaagttgccatcctaagcccaccctacagaagtttggtttctaattttactgtgttctaagctttagaaccgagacaattccaagagaacttgtccagttcatttttatgccttcctttaatgccgtaccaggtgctaatttctgtgccagataatgcggacaaaatagtgaataaggcagatactgtccctggtgccttctgtagcttctagtccactggctgtgaaacacaggttctttggagttgtaagaatgctgtatgtgttcactctttagctaatttgtaaatactgtttttttggtgccaaaccacatcccccaagctctgcagtttattgacttgacaaggatctctctctctctttctctttctctctgtataacataatcctttgtttcgacttaacagtttgagaaataaacaaatctatagcatactatccactgttggttatctaagacccttcctataaacagcagcctgccacagtggcaactgctgtagaatgttttggcagagactcagtttaaaatgaaaacacagtagaagcctattaattaagaagtttggctaattctggactaggcaaaagtttgtttagcaggcctttttgccccataaatgctgtcaaagaaaaattaataaacaagagtttggggattattttggaggtaggagtcagcagaccttggtaggttctagacgtggctctgtttctgattagctgtgtgacctgggacaagtcaccttctttgggcctcgaatgttctcaactggaaaataggctagataaactctattggagggcctttctaacttggaattggtattcatacaagcattttattttattttattttattttgagatggagtttcgctcttgttgcccaggctaaagtgcaatggcgcggtcttgcctcactgcaacctccgcttcccaggttcaagtgattgtcctgcctcagccttctgagtagctgggattacaggcatgtgccaccacacccggctaattttgtatttttatcagagaccagtttcgccatgttggccaggctggtctccaactcctggcctcaagtgatctgcccgcctcggcctcccaaagtgctgggattccaggcctgagccaccgcgcccggccacatacaaacattttaaaagctcccagttgcacgcatctagttgatcagtgaatgacagatctttcttaattattgatgttccaagactctatcagcctggtgtcaattaatttacataagtaaaaataataaaattgtaattcagcctttaattttggtgatttccctccctcttccttgcctcttccttactctgtgagtctaaatcagtgaaatttaactacaaaggaatatgaaaataatgctaggatgaagatgtggaggctgtgcctcttgagatgcagtgaacagtttttcttcttttgttgctatttttgactattctaagaacaggaagtttacttaaactaatgaccacagatgcctaaaaatggttaaatgtaagaggtaggcattatagaggatacctgtggaaaatgtttgctcatatgtcaaagtttacccaggaagcttcctttatttatttccaagcatctatataaagaaaggctgcacttgattgcgtaagcatgagccttttgttaggcagcgtggatgttgcaagtttaaaccccaactaggaaatgaaaagtgagtttcctcctaaatagttctttttcagtatcacatggctctcccagcttacatctggcaagtttttctcttgagtgctttgccggtagtttaggactccagtattgtattgtattgtttgtttgtttctttatctctgtctctctctttttttgttttttgagacggagtcttgctgtgtcgcccaggctggagtgcagtggcgtgatctcagctcactgcaacctccgcctcccaggttcaagcagttctcctgcctcagcctcccatgtagctgggactacaggcgcccgccaccatgcccagctaatttttgtatttttagtagagatggggtaggactccagtattaagaaacactgtgtatggctttgcctttgaaacctacagagttatgaatctggtcccttttgctgctaagtgttgcatcacaaactgccaagccaagttgtaactctgaggtgtcaccattttttttttcttttcaactggacatttgaaaatagtaatgctttttgggtgtgtgttttttaaaggtctgtttttacgctgtcactgctcaaaaatgccaaaaggcattttttccttaaaaaatcacctctgggctaagcccaaatgtggagtaatgaatccagaaaggactttttgagtagttacaagtggctgaaagcaggcactggtgatggaaattgggtttttccttttgcttcaaatcttcctggttgtaaactttttcttacccttattgaagtcagactcaaggtgggtctaatttctcccagcccatgggaaggcagagtgaattactgcttgttgtgccaaccctttacattttgtgtgtggctgtttgtctctacccagacaggttcttcacatattacctggggagcaggagagggggaggacaggaagagcacagttgggcagaaagagcaaagcctctcaagtctgatgggtttgggtttgagtctgacagttattagctatgtggtgaccttgggtactttgcttcaacttattgagccccagtttctgcatctgtaaaatgaggatgaaactacctacttcatagaaatcaacccaagtggccgggcacggtggctcatgcctataatcccagcactttgggaggccaaggtggatggatcacctgaggtcaagagtttgagaccagcctgaccaatatggtgaaacctcggctctactaaaaatataaaaattagccgggcatggtagcgggcgcctgtaatttcagctactcaggaggctgagacaggagaattgcttgaacctgggagccagagcttgccgtgagccaagatcgcaccattgtactccagcctgggcaacagagtgagactctgtctcaaaaaaaaaaaaaatcaacgcaagtgagataagatgtatcaagtactttgccagtatcgatcataatacatagtagatgcttagtaaacgctcatttttcctttccaaggggaaatttggcagatgatgtccgtcgactccaataggtgatccccttcccatcccgacacacttgctcacagagcattctcctttggagagtctcagttgatataggaaaaggatctacttcaacacacacagagaacatacagacatgccacttgttgatgtaaggcttggcaggctattgaaagagaaacaattcatattcttaggcggttctgccctcccccatcaccttctctatcattattcttaaaaatttgtttggtcgactaaaaataatagtactaaaaacaaacttcgatgaatcaggtctcctggggcgggggatgggtaagatcctgaagcagaaacgcagtgactcacgcgcctgtcactgatagctgcccgtaagtgcatggaagtgcatgatgtttattgttgctggtgtttttttgaggcccaagttggaatgcacttccggctccccctcaagtactagcttactggttaggtgggctgttgagtgagaatggtcaggtccagaaactcatggctctgaaatgacccagacgtggtggctatacccttgactgccctcagatacgtgcaagagggagctcacgcttcaagagtcatgctttggccctccacctggctgtgctcctcttactggggcaaggagactgtagggccaagggacaggcccatctagagcaagcacttcctttttccagatcatgctcagaggcctgacccttccagttccctgcatcagtgtcttgagcctgtttccaagtcctgcgtgggcctcttccccaggtctgttttacttgagggcagactgtgttggccatggacagcatgtgtacctgtgggaccaatggctgggcaaggggtgcaggggcatgaaggaattggctagagcttggacttgtggcctggggactctacttgggtgtgcacaaggcctctgaaagttatgggtggtgctaggggtgggctgagatcttgggctgggtctctctgagcttccacattccattgtgaaaccaagaggtcagggaatcctaaactcaaacctggacttattaaagtattggtcaaggcaggatgatagaacgcattctgtgtaaccgtttgttaccttgatttgtctttaaatactacatatggtgtgtaggccttcctctgtatttttgctcttagggcaggcatttctgtatgtatgtatgtatgtacgtatgtatgtatgtatgtatttatttttgtagcatccgctcagttgcgtggccacaactgaatcccagtccaggtggcaccattatatgggtagcattttggagatgttcacaggaattgatttccctcaccctcaacccaggccagagtgaatttaatgcagatgagggagaaggtgctacatattatagctgctcattcaaaaagtggagcagagagctggaccactgaatgtgcctttgtttgctggaaatctttattaagtaccagagatatagagatgaagttgtgtctctgaactgctcagaggcaaaaaagggacaccagtaaccacagttatggtgggcctgtggaagagacactatagtgaaggtcaaacaaaatatttgggagcctagaggaagaacaggtctatttctggaggtatcagaaggcttcacagaggaggcaatactcaattggggccttgaaggatggataggagtgtaggagtggagtgggaggcagcacagagcacagaccagactgcggaagggcctgacatctagggaaggcaagacagtttagggtggccagagtgtggatgagggagtggccagagaggagttggagaaggatgttgtcaagggctttggcttgccaaacttcgtactttgtgtttggaccttgctctgtaagtgtccaggagattttaaagcaggggagtggcacggtgaaagccaccactctatcgtttcttgtttcatttcctcctcttacccagtggctgttaacagcaggttttctgccggagttatccaggtcagagtcgtaatcccttacagtaccatgtggacagctttaggctatgtctggagcaggttgaagatagtgttttgttcactgtcaggagagaagacatgttgttcagccaggagggctcagggaccccaggcgttcaggtaattagccagtgagtcatgtcaggcttttgatatggataccttgggaaactaagtggggtgttgctggcctccatgcagatgcctggtctacccaagcacaggcccccaaattagatctcggcctctgctgggtcttccctgtgcctgacacagtgccttcatatggaccgtctctggtcagtgttttcaatttctttgttgatgatcatcaatcaaggccaggctttccaattccagaccacactgcaatcagtggaaactacctaaattcagtactgcagacccatagcaggatgtatgtttattgaaaacagattatattccttaatgagagactaaaacagcatgtttaaatcagtattcttcattccttttatcattgagagattggttattatttacctcgcctttagagggtcagcttggtggtggtggtggtggtttaagttgctgggtttttaaaagattgagtttcatgtccaaggactgattctacttcatgggctgtttttgaaaacattgctagaaacctcttaactgaaggcaagaccaggggcagcctattgctgcggagtgccctgggttcaaatccctgctccccaacttactgcggtggtgactgtggacatgttgtttaacttatttgagcttccttttcctcatcagtaaaatgggaaaaacaatgacctccctcaaggagggatgttattgaagttatttacttaaatcagattagatttattttagattaaaagcttcttgcaagctgtgaaatgttttgcaatgtcacatattattattttttttttttgagacggagtttcgctcttgttgcccaggctggagtgcaaaggcgtgatcttggctcacggcaacctctgcttcccggattcaggctattctcctgcctcagcctcccgagtagctgggattacaggcatgcaccaccatgcctggctaattttgtatttttagtaaagacggggtttttctatgttggtcaggctggtctcgaactcccgacctcaggtgatctgcccgcgtcagcctcccaaattgctgggattgcaggtgtaagccaccgcacctcgccccccgcatattatttctttatggtgtagaactcactaatactgctaaaaaccctttctgacagagatgggagttaaggcttctaagttcacacccagatttccacagagaccttagagacaatcataaatattgcacaaaattatattggaatatgagctcggggcacataggctctggtgccttgtactagaagcttaggtgagctgttactcttggccatgtccaagcatttgactcagaagatggtcgagtcagcagtgttgactgttagcaaatcacctaagcccactcacatggggtgatcctggtacgtgttgcatggactgagtgtcaactgcatgctgagtgtatgccagagggggtgatctccttgatcttatttacttacctacagtactctgggtacttatgtatttatgtttacagaggaggaggctgaagcattgaggggtcagtggcagaacaggaatcttaactctggtctctggttcctagttctctgagctctaccccatagcccctcaagaaaggatggccattgttgtcctcatacaaaaagctatgacactgctatcattattctcatttggtaaatgacagaaacaaggttcagattacttaggtaagttgctttaagtctcaggctaagggctggagctggatttgccactgaagctctacaccttctagaatctagggtgactacataatttatcaaacaaaccaggatgtttccaagagtgaaaaggggcagcattattaattatggccactattaattacggtccttggccataaatcaggaccgtccaggcaaacctgggtaatagtcaccctgcctctggtcttgatacctgaccaaggtaatggagaattggatccgccagctcatgtgctgttgcttaagtggaagggaatgtgcaaattatgtcctgctattctaagtgaaaggacttgcccaaggtcatgcaacaagttggcaatgtaatattttaaaactggacgagatgttgaaaacatggtaaagttagcactagagcttaattaactggagtatgagttagggaacatttggctatgctgatgtctactactgaagggaaaggaggtggaggtcaaggtcaggtgtgtatggagcaggtgggggtggcagtggcagggcattcacgtggctctactatgtcggcaccatcatcaggccctgtccctttgaagtccgggagatgccactaggcccagtgcaacttggatgatatttaatggccaagagcagagacttctgggacctgacttttcctgctctccactttactttagctctgggcttcaaagggactattggctgggagtggtgaaagtttagtggataatcctgctgaagaattttggaaggccttgaggaaggaattaaaaataacagtaagcatgccttttctttctctttgattgtggtcagtgcatggaatgtgccagggccgctgcggagcaagcacgtggccccgaataacccctccctgccaacggaattctgcagagaacatgtaagggctgtgctgtttcactcctgctttgggctctcagggtttgtttccgcgatcatccaaacctcatcctccttctcttgccccagataatttattggaagtctggagagggacttgagttctctcaactctccaaccagactgttgctgtgggcgaggccatgtcgggtgagctccaaggagagcagttggaatgacagagaggaacggtttcagcctgagaaatgtgaaatataaattcaaaccaaacttggcacctgtttggagagcttcagctgatactacagtgcccctgtcgttagcctttgtggctcagctgggtcttataaatagaacacgatgcatttccccttttgctaccccacagacacgcggaggcatgtgtgggggtggcatggacagagagtattcattacttatgctccagtgcatcagatagtcatcgtgggaactgagccctggtgtcatggggatgactaggccatcttgtgggtaaggctggaagcggcttttgagtctcctgagttacagctcttcttacccttgccagcctcccttccccagctgaggccctcagtccttcatgcctgtgtgccgcagtaagccagttggccccttccgtcgtgagtccatcccacattctgtatcggagcccagcattgctgtatcaggatgcttttggccaaaagtgacttgaaacccaacaaatagcttcaatcataagagggcttattacttccactaagaaggctagaagcaggaaagtcaggcatcagaaggtctcaggagccttacatctttcctcctggccatattctcttcaagcttgtctcctgttggtccaagggtggccacaactgttgcagatattaccgtctataaacgttgcatccaagggcagaaaagggctcctattccttgggggtctctttaggaagaaaaccttccccgggagcctcctggtatcttgttggtcagtattgtatcacatgcagtcaatgacagaaataatggaccctcagaagcctctcgaggtcaagggcccaggctattcctttgactcatcagggtgattagtatggaggtaggtgcttagtaaattttatttgggttagtgcaaaagtaatggcagtttttgccattgaaaataatggcaaaaactgccattacttaggcaccaacttactgattaatgtttgttggttgctggtttccttcgctaagtgagactcctgaacacttactgatgatgtcttgctgacttctgaggacatgatggtaagtctgccctcatggagcttgcagtcgaggtggagagatagtgctataattgtgtttggagtatctcctgagtagattgtggcagtctggtagctttggaagaggtgttaaattgaggcccaaggagacaaaaggacctgagaaacagagcagggggactctctgggcctctgaatgccatgcccagggccacacattttgtgatgcaagccaggttgtttcaggtttcaagcagttgcgatttctgtctccacccctccaccagtcttattttcctgttgacaaaatgataacaacttgccctagggtttgaagtgggggcagggcacagcgctgagagcctcctccctcaggggaaattttctaaagtttctcactgtgttctagcttcaaaaccatatgcagtttaattgcatgtttagtatctttgtgcatctctcttgttttgaatctgctggaaactttctctgaaagcatatatataggaagacataaaaattctataaatgtttagtggttaaaaacaaagtcctgtccaaattatataaagttttgccgtcgtcggacagaactttctgcagatagggaatacccttgagtcttcagtcgcaaagagctaatcactaacttcaagtgtgcaagtgccctttcattccaattcagagaaaacagagcctgtcccaaggcctcgtgttttgttttcctattgatctaggagctgggataacttggaaccccagggaacatctcagagttaattagttttttgaggtcttcttgtttttcttgcttgattaaaagagttacagtttttgctctgattgtttaaaaaaagaatctatcactgctactgatccaagaggtgagggttggcatggggtgggcactccagtaaatacgtaagttgtcttcctgccgtcttgtcctggtggagcagagagaggtgcctttgagcatgggcctggaaccaacagctactttcctggaaaattcttcagtttccagaagcagtggccaggtgagccggggcatgaaaccagacgaagttgccgcagtgcgaggctggttctgtttgcctcagttctgaagttaatggtccaaggtcaccactcatagagcgtcagcctgttggggagacggaggccctgacggccatgccagggtgcccccaaccctttgtttaaccacggctgtggaccagtggtctcagatgtttaccatcgcctgtttataagagggaagtgtggtcatatttctatctctcttgtgggctgcacggttgccttactggggttcatgtgggaagtggttaccgttaggaggaggatgaaataacagtactcacaaaaaggctttgatccagggatctttttaaatgtcatcttttggccactgtgtttttttatttttattttttgctatctgctttaacttcaacgatgagaaaatcaaaccatatgctggacatcattctgcccagctgggctgagtcagaattgcagttcaaactacttctgctctccctgggtttcgtgtgctttcaatgtggggatatctttcagatctgcagttctccagagctagggacccctcagctccagctgctctctggacaatacctgaacatccctacaatatctgaaattgaatgtttgccatttcttcttctttctcctcacacaacctactctgatgttcatgattactggagcccccaggttctaaaaagtgttgaattagcaagtgaacaaataaaatgagacccaaagaaactgtgatcttagcatcctgttttctgggtgaggttgagggtccttggcctctcttgctggtggagatgggctttatgactttggggaagtcaacttgacttcctgggtgttggtcttctcttctacaaaatgacaagcttgaagggagaatctgaaagaatctgtgtatccgttctcagattttctttttttttctttttttttttttttttttttttgagatggagtctcgctctgtcgcccaggctggagtgcagtgatgcgatctcggctcactgcaagctctgcctccggggttcatgctattctcctgcctcagcctcccgagtagctggcactacaggcgtctgccaccacacctggctaattttttttttttgtatttttagtagagacggggtttctttgtgttagccaggatggtctccatctcctgacctcgtgatctgcctgcctcggcctcccaaagtgctgggattacaggcatgagccaccgtgcctggccagtctcagattttcatgatagccctctgaactctccttggcttcttgcctttggctgttttctcaatgcatatattttcctgggggacaaatctaagttttcatctgatgctctgccttcagaggggaaccattccttaatgacctatttaattgtattatcattgttgtttaattcatcacatatttactgagcttcttttgttggtggtggtgccatcagacacagtggtccaggagctgcaatgcgttgctgatgaggatggtcacacatagctctgccctcatggagcgtcccagggtgaaatgagacctcccctgagaaccgactcccagggtaggggaaatcagtctgcaggcaaagaggaattcaaatttagcctgaagcacaggttttctgtgcttctaggcaccggctgcattccaaccgtagtgccataaaaatacaggaaggaagggaaacgtgttcacaggttggttagagatgtggaaaccaacaatcagctctctcttatccgtaagaaactagaatctactgctggcttcagtccctcagacctgctgctcaacagagtgccctttcaaacctgggttagactctgtgctaatggcttttttcatgaacctcagacagccggaaagtatattctttgaggattatgatcgactaggatgctcgggaatctttaaagagaagcactatcttggctatatttgccctcagttgttttaaggccagtgaggagactgagcatttcagaggtgaagcatttagaggatggcctctgaaagcatacggctcagtaaacaactgacccatcctttgtcaccgtttttgtccagcggctgtcaccataggggctcctctggtgtggaggagagagaattagaggcagcaggcctgggttctaggtctgcctcattgtgaaccagcttcaggaccttgggtgagtcacttttctgccctggcccctggcttcctcttctataaactgaaggtgttggcttagcaggattttaaagtttcttccaccttaaaaactctgattcctgcacttgcattcaaagaaatgactctattactcatttgaatagtttcagaatcactgtatagtcaactctggactagaaatgggggcctgcagttgaggacaggatggaaagaggtttggggttcagggtgggctgtgagggctaggattcttgattcctcatgatttgcaattggttgttggtgttaccatggaaggttctcaaccatggctgcttttaaaaattttgatgctcagaccacccctggagaccagtgaatttcgaatttctacaggccggcctggggaaatccatgttttttaactttcctaggtgattccggtatgtggccgggattgagaatcacagccatagatgcttatgtaaagctgtgttcagtgttacaggcatctgttctgggtggaaagtgatagtggttggtcaaaaaaaaagcgtgcgcacacacacacacacacacacagagaacagctctaggttctggaagtgtgttgatttggtcaccacaagtgctggtggtgagtagttgccctgaggtttggagttccagttccctcctatctctgggtcagtggtttctcaacatctttgaagtagtgaaaccatctgtagttggttatttctggtcagaaactcacagtacaaagtggggggtggtgcaggggggtggagctggaatggattaaacaggcccttacaaatgcccacacttttttcatgaaactaagttagaggccttagccaactccagcataccttagtgtcagttctttggcattgccccggtggattctaggggctgtgaaggctgtaggggtgtgtgttactccctgctgctttggtgagagagtgtccctgtctttggctgagagcatcctgtcctgccacttcatcagcagtagcatctaaacagcccttgaagggaatcagtatctacagcctaagaaatctgatgggacacatctctctgcattaaaatattaacagaaaaggtcaaactgggaaggggcagctaagttggaatatctcattcaggtaaagggatgggcttgtggatccttaattggtgtgaaatgcgccctaggaggggagactatatcagtgctgaaagcccttgagggctttcacagatgaagggggatggtatgagaagctttacaaataacaaggtttgagatgcagttgtagacacatgccagatgtaggttgctattttctcagctcaatgaggaatctgtcaaggcactcttagaaatggaaaatatagttcctgccctcaggaactatagtgtcacgtgatagcagtgaagaccttctatgtcctggccacacagtgaggatcagaagacagagcatggagagtggaatgggacacatggatcaaggaacgtggacctgagcaagcaaaagcaagtcactcgggtcccactatcacattgcatatcttctccttttttttttttttttctgagacggagtttcgctcttgttgcccaggctggagttcagtggtgcgatctcagctcactacaacctccacctcccaggttcaagcgattctcgtgcctcagactcccaagtagctggtattacaggcgcctgccaccacacctggctaatttttagtagagatggggtttcactatgttggccagattggtcttgaactcctgacttcaggtgatctgcccacctcagcctcccagagtgctggggttacaggcatgagccacagcaccagcctcttctcctttctaacgtgatgtcagtgtctctgggaagcagccttagttggcacctcactggcagcaagaatgacttcatgttcttgctcccatgaaaattctctgctttcaggaatatactttcctctaggttttttctttgtctgcaagtgggggggtgttctttgccagatccctgctttgatgattaccatctgcccacctgagtttcctgcatagtttcagttggaaactcttttctctttggaccctaagataccgtgtaataggattgttcttggtttcagtaggcacctggcaccctctcagctgtggctgcatttcaggtatggatgggagtgattatctgtgcatcagaaaactcaagattgtcatgtgagcaagttgtgtgatcatcagtaaatgcagagctggctttgttaggccctggttgtggccaaggctttcctttcctggcgggtgattattccagatttcatggtcactagctgagtgtaatcaggagcagataagaaagccctgtatagagcaaagtatgcatttcttaaggtggtgggggaggtggcagaggcattatatagacgtgtgtgtttgtgcatgtgtttaaaaaaagacttatgttttctgggcagcagaacttaagtttccagtaaacatctcctccctttttactttaccttttaattttgtgtttatggtctctgtgctttgaaattgtttttgctgtgatgccagccctgcctgaaatgggtggagcaagccaagccctttggaagccatggtttagatcagagttcttgtactgacatggcccagctgattgacagctcagatgtgatcactccgtctcaactagaagaataaaaataaaaaccttgagctggagcggagaggggtcacacatttgttagtttatcccctactctcacctttatcgcaggaggagtgataaagtgctgctgtgtgtaattctggtctggggttggttttctgtagtcccaaacctgggactaattctccctggagcccgtggcccagaagatgggtgcacagtagggttacttgatgctaaacggctttcccgatagacttgggatctcactgttcttgtcttagctttacttgttgggttggaggaggtgaggtgggtgggcaggggcctagggaagcccactatagaaacactgggacagagaatccagcccaggctaggtgagagcatctgccagtgtgaaaacacgtggaagcgggggaggcaggcgagaaaagctgtgggagaaaacctcacaaatgcagcaaagctgcccagggcccaagcggtggggcggtagcgagggaaacacagtggtgtttggctgctgcttcacaccacttttaattcagcgctgctaggaaggctatttcagaatgctcccgagtgggagggggcagctgctctagggtgggaaggggatgctaaggccgggtgcggtggctcacgcctgtaatcccagcactttgggagccgaggtgggcgaatcacgaggtcaggagttcgagaccagcccgaccaatatggtgaaaccctgcctctactaaaaatacaaaaatgagccaggtgtggtggcgggtgcctgtagtcccagctactcaggaggctgaggcaggagaatcacttgaacccaggaggcagaggttgcagtgagctgagatcacgccactgcacttgagcctgggcaacagagccagactctgtcttaaaaaaaagggggtgctggagagcatgtggggtggatagggctgactagagacctttgtcagggtgacctttctccagagagcccagtaggctcagaaggaaggtccctcagcaccctggcccacacagttccagggagaccccaaataaagcatttgcacaaacagtcctgagtggagcacacctagccgccttctcttgcaaagtgggcctttaaaaaaggggtgtatggctgcttagttctgaagaggccaggctaggagaccccagagggacacccagaaatcccagatatacctcctccatctgctctgcctgccagatgacccttgctactttactgttttttctttgagcctcttggtgatcttgaatagcagaaaaatgagccaaatttccttcaatctatgccagtcttcgtcctcagcctcccggtggggtgatgaatcacaccagtgggaaagtgcactgtatacttggtcatgtgcagagcaccttcccattggtttatctttacaactgccctgggtggagacacggcaaggtggtcctatccctattttgcaggtgatcaggcacaacttacagttagcgcaggaacagggactgaggccagccctcagttctttgacagagttctttgtctacactgtgttgcctcagaaaaaaatgcccatggggagtgtgtgtgcgtgggcatgtgtgctctcctcgtgtccctcagaaaagaatgaattcttttccaactgatgtcactgggaaagggggacaccactactttcctgcatactgcactttacagtttacaaagcactttcccacacgtcatttcgtttcatctccctgacagtccctggaagtgggtgctagtctggatgagcaggcgcagacttggagaggctgagggacttggcccagggcatatagctaggaagcggccaggcagtaagtgggtagcaccactgcatgttgggggtggggaagcatgagctggatggagcattcggtggtctaaccagtggccagcagtagtgttggggtttgctgccctcacctctgaagccacacaggctcctgcttcctgaggtcaccctctcctggagggctgcccccgcatgggagtgtggacaagtgtgcacgagggggaggcacacccaggccgagtggaacaccaccctaagggggtggtgacaggtggcactgggagtggctggagtcggggttcaccttactcagggtcagggcttcccattttgcaggactgagaggtggactctgaaggaatgcagtgcttagaatcttggtgcctctcctggggtggtgggaagagcagggagtctcgagtccgattttgccaaaaatcccaactttcctgctgagtagctcatgagacaggcatttcacctctctgaacttcaacttgggggtactcagatttccttcagaggctgtgaaagagtcccctgccacaagttactcctctgttcagaagtgacttgactgatcatctagcccaaccccatcattgacagctgggggaaactgagctcctgagcggggcagtgacttgcgcaagtcatttgttgggaagaatggggcaggatgatgatgatgtccacttcttggggacgatggggcagggtggtaaacacttctcaatgcttgcttatgggctctgatgtgaaccactcactataggctgaatcctggttttccaagtgtttagaggctgagctgttgtcccctgggattttggaaggtagactcacatttcactgaaagccctagatgcttctccttactgcagttcccctccccagcactcccatctccctgttttctggggatttaaatcagctttgacttgggtctgaaagtaacccgtgacagcagtaagcctctcgatctgttgtttgcagtgtttcagctaaaatattataaacagaccaccaaactgtgtttggtccaaggccaagcccctccctccctacttgaacacttgattacctgctgcagggttgcgtcttgagctccgaggaggaaactgtttatttcagggctgttagagtgcagtgcaggaatccaggagaatttattgtattgttaccatctggtttcatggagtctgtttcttttgattttaattgtgccctctggagagaaagatcctcgaaatggtggaaaaagaagataccaccttcctccctgccctgcccatgccctggcacacacattgctatggtgcatggtgggcatggctgaaccaagtccccttattctttgaacatctttgcgtattattcctgctcccccagccgtctccaggccccagtctcctctggagggatttcccagatggcttccaggccagagcctgacaggagagataggacctgcctccacggtaacaaatggctgaaggcggtttggggtgttgccagtagcctgcccttccgcagtggctaaggatccggtgttgcggtgatacatgatgtgacctcttcaaccagtgagtcactcacccccagataaccacccggtactttcaggggaaaccgttgtatcattgtggctgtggccatggtttctccaaaataaggtgtttttagaaatgaaagtacagggattggtttccttagattcattgtcatggattcatagttccccaacctttttcacgtaaagactcacctctgtttcctcttaaattgtacatttggtgtctgttttatatattaataataactgacactcttctaaagttttttggggaaagaaaacataagtttaccaagctctcaattctagaaggtaatagccttctagaattgtccatttgcataagcatttttatgcttattgctgtaatcagtgtgtcagtcaaacgggaaggaggaactacatcaggtatttagcacaaagggaatttaatacgggaccttggttacacaggtgataaagcagctgagaagccacaatgggaaggtgaggtgatccagaacttggaggaagccgctgcctttaggctggagggacaaagggaacaggtggtgttcccagagcccagggttggggtcaccagtgggcctgtctagagcagttgcagctgcttctaaaattgccgacccaaggtagaaaaggagagaggggagaaacactgtggcctctccctccctcctacccactgcttgctgtgagagcctcctattatttaaaccctgctggaggcctcctgatctggagcctggaaagtcagggctcagccccagggaggacacagcagagcacaggaagatgagggatggatcagagggcaaactggacttggaccagcacagggtgcaagcctgatgctctaattttatattttatcagcattttcttatatgtggctttcataattacacatattttatcaagtagatgaaccgcatttaaccattccccagctgttaggtgaacactttaaattactataaatcagcagttctcaaagtgtggccctgggccagcagcgtcagcatcaccagggaacttactaggaatgcagagtctcaggccccgcccccaggcctcttggatcagaaaccctgagggcggtcccagcagtctgaattttgtacactctccgagggctgctgatgtgcatttgagcttgacaatcatgattataggcaatgatgcaccgtgtggaagctgggggcaggatactgaggagggtgctgggggtaggagtggtggagggagtttgtccaggggaatgtggtgtagcggaaaaggcacaggactggtagggctgtgcccctttaggcccaagcctgcccttgctcttaacctcttaatgggtttcttctttcttctgttaaacagctaaaaatatcaaatcatggggttgctgtgacggttaaatgtaataacaggcacgatgttccatatatgttgggtcttctggagctttggggaaggaggtgtggcaataacagccagcttctgcatcatggaaaatggcccccatgcccatccctgagttgtgtggtctgaaaatcaatgatgaacacttaggaggctcgtagcctgctttgagtcaacaggaagactggacttgagagtttggaatctatagtctaacttcccttcctcaccctgtctttgtaaatggtgctcatctaaccctacagttactatcttttcactcatgtctagcgacttgttagaggggaaggaaccctggtgtcaggacaggactcctggctccctgagcttgctgtgtattccggggcatatccttaacctctctgagatgtacttttcttatctgtaaaacctctatgttgatgcaaatcaggtgcgatgatggacgcaaaaactgccttgaacaccttagcgggcctgtgaatataaagccttcaggatccacacctctgccagggccgacaccagcctcgccacctcggtgagcctctcattccactgccagtgcaggggtgcataatcaggatttgccagtggaggtaggaagggtggctggattgtgactgtcacgctcctggcatcagatgatactggtagcaagctagggtcgtctgtgcactttgctctctctcagtcttcccagcagccctgtcaagcggggagtctagcaagaagtggccaaggcgcagatcatttaagaggaaggatgtgagcaaactggatcccaaggggacagacggaggcccactttgcctcagagtccagagagctgctgctgctaagaagggaaagaggaactgggtcggggtgcctgctgacttgcagcgctgtgttggcatgcgaggtagcactggttgggaggcggttacctgaaggaagcaaaggcagctggtggttcctatcttcttgcctctggcagcacctaaaagaagcctcttgggccaatgagaggatggactgtcccccacctgcagagttctgtgaagtggtgcggacgtctttgttgatctcatttggtgcctccccctgttgatggctgaggaagccaaggctctgagaaggcacatggtttacccgaggggacacaggcaaggaatctgaacccggattgcattttctgttttagggctctttgtgtgaccacggtgcttcccaggcccacacttccagtgttccaggcccttgaccaccaatcctgtggaggggtcctcagggcaggcagtgggaccacctgaggcctgcgtggggtggcctgtggtgtgagggacccaggaagtcagcctgcacctcggcgagtcagaagatgtggccatccaccaaccatcagatgttcccctacgcttagggctgtgaccagaagtggcatcaagatgggaggcgaagcttctgggaccagagaaccagctgctcctgttcatcctgcttttgggtgaatagctgatgctctgggcccctcatcccaccatcccaccccgtggctcctcctgagcagggctgagggcatttacctggctgccttctaaagcagacttggcacgagacaatcttattcaaactctgctcaaaattgctaccctgaggagagggctgtgaccaggcaggacggggtgtgataacatggaacccagggcctgctggagcaggccctgatgagtgtaaataactgtgttagaggcaggacctgagcttttcactccataaatatatattacttctaatgtggccagggccgagctgaagatcataattatgtgagatctgctttacaggcatttagggaaatgcgtggggctgcactgatgtaggcaaagatgtggccacatacatttaacgtgtctcagaggagcctttgctttaaccctttaatcagacccttccagggtgctcctgacttgatgttccagagcgtttggagtcagagttgcactcttttttcttgcattaaatgcacttgagttttaacccagtctctgggcggatggcagggctgcatgagggggtctccgtggatgtggataagtccagagaagtcagctgagctgactgggcaggtcttgggtaagtcacgccacttctctgagcctcagtttctccagcagtaaaatgttacctgtctgttagggttgtaagattgagtcaacatatgtacaaggcattgcttagtgtttaccaccttgctgtgagctggtaaatggttggttggtcccttcctctccccttggtgttaagcatatcaaaagatggctgcgtgctcacctcccctgctttactgggtggacaaaggagctgtcacacagtgtggcagccttagaaaggttaaagaaggccagtgaagtcttctggctcatctggtcctgaggtgggtgagcattaaacccagatcctttttgtgtttcagtattggatcctttggccgtcatatctgagacccagggcctcagagtgtggggtcctaacctaatttggctttgggtgaactggccagcaaatggaaggatggctgtggaagtgtgtcttgagcctgtccttacacaggtgtggctgtcatcaaggccatcttcatgggcacgtgacgagtacagtcacatagagttcatgctcaggagggccctatgcttggtttaatgctctgctgtcaccagcttgaaatccttttttttttgttattgttgcccaagctggagtgcaatggctcaatatcggctctctgtaacctctgcctgcgggttcaagtgattctcctgcttcagcctcccgagtagctgggattacaggcacccgccaccacacccagctaatttttgtatttcttttagtagacgtggggtttcaccatgttggcgaggctggtctcgaactcctgacctcaggtgatccagccttgggctcccaaagtgctgggattacaggtgtaaaccactgcatccggcccatcttgaaattcttaataattttctctttgacctagtgttttggagcatgagcatggatagaggagatgtgggcagcatgtgcccattgagccttctgccccattcacatgtagcatttgagcacagacttctgccggacctacaatgtgggggagttgagtgagagtcaaagtgagtgtgagatgtcacatctgcgactgagtagcaggggccctgacagtcctgatgctttccatctaactggaacttgtcttggttgtagaaagaaggcgatgacattctaagaaacatcaacgaccaaagaaccccatcatatcctttattactcacgtcacttccctgacaccaaccacttatattgaaaatgatgacggaagaaggaaaaggaaagatagggcacccatattgccttttcctttcagatcttccttactcctcaggcagcataaagagtgaggtagaatggacacatagcgagaagtgaagtaaaaacgattgagttagctttatggatgtttctctggttctggtacatcacaaaatgcacatccaagtcctaaaatacaattcatgtaatgttggtgattccacatactagttaaaggctttttatatttgcagttaaaactggcatcacacaatataaataggagtggtaaaattcatgctaattcatgtaatttaaaattttaatgttgctttacttagaataatattaaatagcaaattaaaaataccatgacacatcaagagagagactgtggaggaaagagaaaaagctttctattttagtaccatgattgatactttttttttttttgccttttgcacaaagggttccatattttcattttgcactgggccccacaaattatgcagccaaccctgactggcatcctggggctggaggtctcaggctggtcttgcacgtgcagcctctagatccctggtctgctcacattgtctcctgggttgcggagctaagaagcatcatataggcaagtgagcatgtgtgcttgctctgaagattccaagcttccaggtggtggtggctctgttgatagagataaaaagttgaggaatttcagaggctacaaacatactcttgttgaaggtgctttgggggtctcctgagcatttacttttgtgaatttttgggcagcctagtatagaggtgatccagcagtaagctgagagagaggccctagtttgactcttaactcaggcatggtctccttgggtgagtcatttcttcatcaggcagtcctcagtcttttggttgcagtgtagttgttaaaaatgtgggtacttggaggctgaattcttgggtcaaatcttatctccatctctctgtcctttttttgtggttttttttgtttgtttgttttttgtttttgtaggggacaggttcttcctccaccactcaggctggaaggcagtggtatgatattggcacactgcagccttgacctcccagctcaagcgatcttcccacctcagcctcctgagtagcttgggactacaggcacacatctctatgctgggctaattttcatgttttttttgttgttgttttttgttgttgttttttgtagaaacagagtttcactatgttgccccaggctagtctcaaacttgtgagctcaggctatctgcctgcctcagcctcccaaagtgccgggattacaggtgtgagccactgcgcccggccttatctccatctcttaactagttgtttgatgttgggcaggttgttcaagcctcctggagccttggtttacccatctataaaatgggtataatggtaattatcttatagcatggtcatgagcgtgaaatgagagcagggggaggagtaatcattgtgtctggtccatgggactgaatcaatgctagcaatggtcatgatggtgaagaatgaggggaggaggaagaaacaattcctgtgggtgctaggaccaaaagtagtatcctctaggaatcctggccttcaaggtctaacttccaagattctgtgagtacgattctagggagcctctgcctcagacttctaagtagttcttcaggctgtgctctagaagttactggaatgaaagaaaaattgtagtgtttgaaggtcttcaaggatcctggtcctctcacactgtcactcttagtcacatgacctttgactgtccattccctactaagccttggtttacgcatctgtcaaatggagcattcgtgggtgtgcctgccttagaggatgagacccagctgagatgacatatggagaaatcgtttataaacttaagtactggtgttaggaagagctaacacggtgagtcttcagtgtttctttaagtgctgctcactactgtcctgagagactccaagaagcagttactttgtttgggcctcagttcatcatctgtgagatgagaggattgggctttgtgcctaaactgcccccccaccccaccacccaagacagattaaaaaagaaggaaggagggagggagggagggagggagggagagagagcgagcgagcaagcaagcaagcaagccagccagcaggatttggaatcgtcccctaattggaaccacaatcgcaggtttcagggactcaggaaagggtgcagcccagcttgtggttgagaaatgaatgtcagatgttaggaagaaaaaggcctatctcaacatagcaggggtttcttactgcccctgcctcctcagccccggtagcctgtcactccctggcgaacagcttggcagcacagaggcaaaccacagagtacatttgaggcccagatctgcttatttcgagggtggggccgcgtttttctcctgccacagtgagctaattaaagaaaacaagcttcgggagttgggagagaactgtccacaggacacttggggaggcttgctttggttgtggaggcctccacagcccccggaaggcaggtggaagtgggcatggagggtcctacgcatccccagcgggggtctgagggcccactgttgctcagctgggggatttggggacggtgggagggcatacatggatgggagggtggactccgttcctgagggggccagtgtggaggagggtcaggcagcccatggagatgggacagtgttctgaaatgcttcacaaatgtggacttttgccccaaactgtggacagagcgtatgtcctgagcgaggatcaactctgtgagtacccatgataattctcctttctgtggtgccgccctgttgattcatgtgtcagccttagagaaagtggctgtgacttctgcattcctgggaatacactgacatgagaagaagtagccgctcttgttcaaagtcacagggctggaaagtgggataaggactaaggacttctgtctctggattcagcatgctgattatggggaaaagcagacatcaattcctcatgtcttgtaagcatcactgtcctccaaagttggagcccagctcagacagctgcatagtattttatagagaaggtgtgttgttgaaatgttgattgtgcaaattgaattgtgttttaagactactgggaaaaccatttaaaggaatcctattgtaagtcattttgaaaaatggagaattacaccacctccccaaggattttctgttttggtaaatttcatgtggcaagattacttgaagaagggttccagtgttttgctagcttataatggttactgcataaggaaggtttactcgccagaggtccgcacacattggagaactgggggaatatgtaatacttgtgcagaaatgttttgattcatgtactcagaagatgggatctggatgacacctccagcctattgattcccaagtaaggtgtgatgacaccaccaccagcgaggtgtgctatgaggaatttttgttgatgatgaaaagtgaatgctaactgattgcacaccacgtgccccataccttacatagattatcttatttaattgttgctaataatagtactacagtctgtgaatgatttacttagcaattaattcaaaagcatattccactctacaatggaatattttttgagccaagaaatgaagtacgtggccgggcgcagtggcttgcgcctgtaatcccagcactttgggagaccaaggtgggtgggtcatttgaggtcaggagttcaagaccatcctgaccaacatggtgaaaccccatctctactaaaaatacaaaattagccgggcatggtgccacatgcctgtaatcccagctacttgggaggctgaggcaggagaattgcttgaacccaggaggcagaggttgcagtgagccgagatcgcacccttgcactccagcctgggcaacaagagcgaaactccatctaaaaaaaaaaaaaaaaaaaaaggaatgaagtatgtgccacaacatgggtgaatcttgaaaacattgtgctgagttgaagaattcagacatcaaaagccacatatcacatgattgcattcccatgcagtatccccataggcaaattcacagagacagaaagcagattagtagttgccagggatggaggagaggggaatggggagtgactgcttcatggatacagggtttccttgaggggtgttctggaacaaaatagttgtggtggttgtacaatattgtgaatgaactcaatgccaccaaattatacacattaaaatggctaacatggtagatttttgctgcatgtattaatatattaatgtattaataaatgtattaattacaatattaatatattgtgatatactgtgatatattgtgataaatatatcaatatattgtgataaacatataaattgattttaatatatattaaaatcaaatgtattcctctaatggtgtccatgtcactgacttagtttctgatatgtttgtattgggtaggaaagaaaggaatgggacatttacgtgtacactgaggcagaagaaagaatgggactttccaatccaggctctacctttatgaggaaccagagacccagagagtgctagtgacttgctcaagggcacagagcagcgtaccagagttgagctttggcttctagcctcctcactttctattggggaagtcacagtggaaaagggggttttggctcctttatgtctttgggtatgttctgggtcactgaggatcagctctattccacctggcattttgtgctttccttgggtgctcaggaaactgtctgtctcaccctgaggtgaggctcaggaggctctggggctttgtagtagaaatagaaatatcccaagtcctgggttgtgtccttgtggatgtgtctagaacaattcctgttgtgctactcgctttgggcagttagcgaaagggactaattgtgtgcaaatacatacgtttggtgtttgttgggagacttgccatgtgacactgcttcttcttttcttctctttttgactatgaacacctgacactacaggaaataagaaactttccagtacctaatttatgcttactctactttcaaaccctgttggccccagcacagggtaaatgaaactgtagcttatagtaatatttacgtatgggagtcaatgagctgtttaaatacttggatgtcagaaaaaggtttcaaatttagcaagccccctgactctcccaccctctggcatgtactgggtaggcctgcctgctctctgaggtcgagctcttgtatcctgtcctggtcggtgccagtatagcaatgatgatgacagtgatgatgatgccactggaacaggctgagctgtaattgaattaaatatctgtgtaatccctaggagaagctgaataaggtttgaggatcttggaagttcagttatactctcagtaactgaggtgagatccgtaggcaaggaatgacaagatcgagattgattagctacatgaccttaggaaagtgacctaaaggttgttcacattcagagtcctcatctttgaatgtgaacgatatttctggcctctcctatcttatggagttggtgtaagcatctgcatgagatgatggacgttaaagtgctttgttagctgttgagactcttactgaaatgaaacccaaggatgggtgccactgaaagaaacaagaatgaatgcaaactggtttgtgttgggagttgtacttggcacagctgaatttgcctttgtctttaggagagccttagctgtgggaagcagggcttggaatgcgctgatatttatttcttccatcaaattggattatgaggcacctgatctgtttaaggctgtgtgagtagaaccaggtcctgccttccagaagttcatggttaaattgtgttttcatgggtcacctggaaggcgagcttgttgagaatgaggataattgacccagtgaatccttcctgcctcgaggcccaccatgttattcagatcagtcttgggggaaatgctgtgaaagtgtgtgtgtgtgtgtgtgtgtgtgtgtgcggtgtgtgtgtgcatgctcgcgtgcatgagtttgtgttgagagaaagaaaaaagccaggagagtaggatgagtcagatttaaccactgttttttcccttttgaaacttgttatgttcatacacatacagcagtcatgcacttgctcagaaatgtgtgaaaaccacttaaaatgtgtgaaatgcagccctttagaaagtgtgccttccaccacattcttttgagcagtggagtggatttgtgagtgttcatatctgtcctcatctgtgggaattgtatgtccaaggtgctaattcagggccatactgggatgacgtgtgtgtatagacttgtcctgggtgagatgggagcaagaccgtccaatgtatgatggggaattctgttaaacaggtagaattctgaacctcttggtggtcctggctggtcagttgcagggagtgacgttgaatggactgggaagatctggatataccatgtttctgtaggcatgatacgtggtcccttagcttggtatttaaagttctttggaagtgaccgctttctggatttacctctgtgcagcccctctgctcctcccaggtgaggctcatcatagctcctcttcaatgtgctttgtccacaactgctgccatgttttagctccccattacgtttcctgggatgctctcctagactcctctgtacctttcttctttcaaacccaaaacaggtcccatctccttagtcttaactgtctatgaatggtctgttgcctcacttcccagctctggtatgtagtacgtgctcagtacacatttttgaatgcattaatttggctcttttctgtgaaggcagcttgtctgtgtgtcattcatctgcccaaatttgattgtcaacttccttcgtatggagctgtactgctctttttgttgtttttcttaactccttgcccctgcctcccatcaccccagtggaagagttatagtcaaggtagtgtagtcaaggtcgtgcaaaagctacacacttgaacctgttccgtgtggtttcacacaaggcacatggcctccttgggactcacttcacatcactcgacaaggggatagcaggacccaccttgactgtattgaagactgcatgatgatcaggagagagtgagggatgagaaagagtttggaaaacagcagaacacgatgcaaacatgagttattcatggttttgtgtccaggctaactgtgccctgacattaaggctgggtgggtctggcccagggcttctggggtaggcgctgtgctggtgtgtgctactgacctggagtccaggatccctgagtcccactcaccctccctgggctgcagtttcctcagcccagctaccctttccagctgtgactgctggttgtggagctgaatgtgtgtggggtgtgggcctgtgtgtggactccccacccctgtgcggttttcctaagcacacagcacaacaaggagctggaacagagctgcaacaatgaggagggtttcctccaactgtcagtgcttctggatccaccgtttcggctttgacattaccgtgagtgaccaccctggacctctttctttgtgccaaactcgttgctggattgccataaacacttacttggattgattagagaggctatttgccgtattgaaggtggcagaattatttcaccttttccagaggtgttgacgttcaagggtagttggtggtgactgtacagaagggagacaggaagcctggaggaaggaaaggggtgcgtagccgagaaagtgcacaacgggccctatttttaaaagtgcctgcctctgctggttttgttgtggcagcgctcaaaggcaggaagacagataagatcggatttcaggattttcgtctgccccccatctccgcccccaacttttgacaaccaagaacttttccccaccaggagtgggtatatttcaacttctgtaatccctgcgtctcgcacaatgcttggtattacaaggtgctcactgagtgtttgaatgaatgaatgccttcccagttctcatcacagctatagggtgtcactgtatacatcaagtcatggttagccgcaggtttgattggggaagagacactaatcaatgtatctgattctagaagaagatggagcttctaggaagggcctgccctcaggctgtcctctgtgttccccggcattctgcattttgcagtcacccctcattatccctgagtccaggaacacctgagattggaaaggattccagccccatagggcctttatcgtggcccccagtaagtgataaatattcgtactaatttggggcagtgtcctttttccagctgttttcccatgagtgccctctgttccgtcaggtggccgaagacggataactttggcaaagggcttggcacaaatggccaagtttacactggatcactatactccgtgttatcttgtttccccgatggtcattgccacacaagaaagtacttcctctgtgggctttgcccaccctcttctcttgacagagacctctgggcctagataaatgtgtaaactgcattgcaggaatgaagccgtttccattaagaactggggtctatgtcctgggatccagttcttctcccccttttagtactgaaagctgcttcccatctgaaagctgtctggggacagacaccgtgcagctgcgtgcagacttctttcagagtttgatcttgcaggcttcccagtggctctcctcttccttgtctgcttcctgggggtctctcagtatcaaagccacctgtggctccatctcacctccctgaacaggaggcactgtttgtcaggaggccttgccacctttggccctttctttccaaagaaagatccctggcctggagtttttgtctcagctctgttgtgtgaccttaggcaagtcagttgacttctctgagcctcagtttactccttagtaaacaaaaaggttggatgaggcgctctccaaagttcttgccctctgtgtccttcctctgcgttctacagggagggagtagctgcctctgtttggtggtggggactcaggcaggatgggtagggaggggtaggggaacaagatcatggcgcacctccacggccacagtggaaaccttgaaccttgagctgtatgcggtgagtccaggatgctgagaagatgccgggctgttgggtaagcagagcccctacgggaagcaaagagtattattcagccctgtggaatgctgaggcagggctgagcttgggcagggtggctgagagaattgtggctctagctgtgggcagaaattcatggccttgaagaatggctactgtatataccagtgataaatattagtcactctggcagcagaatgagtttcctgtgctgcatttttggcacttccagaaaagggaaagcctttctctctgacagggcacaggagggagaaacaggaatgtgtctcttaccctgatgccctggctggagatcccgtggggttttcaacctgcctgaagcaacgcagggcctgctaatgcctcctgttgccctaggtcaggccagggcccattgttgacatctgtgctgtgctgcctctgaaggtcttgcttgagcatgtcctgaatggaaggcttcatctgcattcattccccggccctccctgccgtctgcacagcctcctccaggcctccccttcccagtgaaaagcaccaccatccagacctcaggaagcaatcattttagcctcttctccttctccctcaccatccaggacatcactgagccctgtcagttctgcccccagaatatctaagttcatccaatgccccatttccactgctgcttcctcacccaaatcaggatgtttctggccccgtctccctcctacctggtctccctgcctgtaccctcctctccactgggcccattctccaccggcagccagcatgatctctaagaaatgtacatctgtcatctgtcatatctgctgaaaattgttcagggcttcctgctgccttgagaatgagggtctgaatcccaaacaagggttcaaatctcaacctctcaggcctaccctgaccttacgtatctttcctcagggcctgtgcacatgctgttccttcttcctggaatgcttgtccccatagttttcagctggcgaatgtgagtcaggtctccccttaaatgtcatctaagagagccctttctaattcctccccttcatcttaactctatccccaatacactctctcacagagactgttcttttccttctgagaccctactccagcttgtagttctaaatctgtgattatgcactgtctgtcttcctcttgaggtcaggggccatttcttttgttctctgctatgctcaggacccagatcaaaggagctcagtaactatttacaggcgtacatcatatgtggaggacacttatgctgtgatggccccacacacagcttcctttggggtctgtcccctgctctccgttacccgcgtggtagccactgagcactggctcttcctggcttcactctctggcatcaaaacttatcagtcctacatctcagtcttttgcaaggtgacacttatctgattacctaattcacacgaaggtgttaatggtggtaatggcatagtatttattaccccaggggacccagaacggtggtatcaaaacatatcattccccagtggtttaaaactctggtagctttccagggagtccaagtggagtccagtctccttagctgagttcacagggccccgtctgcacgacttggcttctgtcggcttccctagccctgacttcccaagccttagtcatcaccctctctcccacccagggctcagcacagtacctggaacagtcaagccctcaataaatgtttactgagtgcattaaaaaaaaaaaaaagattttaatgagtcatgctttaactgaagattttagtgtaatcagtcattgggccttggatgccaaaggaatgacaaatggtgggaatttcaggcacagtgactgtgatagccccaaggaaaccaagagagaagtagctttatctgggtggaggggagtgggcctttcagagcctcgaaatcttcccacctgctgcgccactcccaccacataagcaccccacccttcttcccagggtgagatttctcagctctgctttctggggtgccagacaaggggagagccttgttgccatgccctcctgccctcctgccctcctgatgcagtctgtggtcacctgcaggcagagacagatgaagtccgtcattcggctgcgagtaatttctgatgggagaggggcttcccccggcccttcccgcctctctgagccttgccacggtcacttggtttgcccagcctaagtcactgcctgtcgctgtggttattgcatggacagggcctccctctgtccctccacttcccttccctgccccatactgttgccctcacccaccccaaagcctcacccttcccttccatagggatatggcctgatagaggaggagccatttgattttgactattgttgaaattgagtggggaattttgggtttgttttaggttttggaagggaggattatctgaggcttgaggcttctgtgatactgacatctggtgtggaaagtcatcctccctcacctaggtgactgggcctccaggtcatctccccgagcagcctccctggatctgctctcctctcccccccacccccccaccacctcccgcgctgtgcccagggtgatctttctaaaggacagatcttgcttcagcacctccctggttagaacccttccgtccagtggttcctagtgcttcggggataactcgccttgtcccttggggtctgcacagtgtcctccatctcctctcacttggccttgccctcgggggctccggtaagaagctttccaacctggcagctgcagactctgtgcggttgtattattgctgtaaatgggcagggattacgcatttgtggagtgactgatttcaagtacaactgccaccatgggagaggtctgtgaaaatcactggaattgaaaatgaccatgctttgcccaaaaaggttgagaatccccactctgatgatactagaagcctgcttgcctccccaccctgtgccaagccatttcttgcctccttgctttgcccataccagcctggaatgtcccaagcctattcaacttacttcctccaaaacgtagtcccatcttgatctccaggaagcagccttcagatgccccctcctcctggccactgcaaatgtgtccccccagctgctgagcatgcctaggtctgacacacaccacgatatgttgaaatcattggtttctgggttattcttctcacagtcccaggcagtgagccctcaaggacaggggctccatgggactggtctctgggtcggaggccaggacccaggtcactaagggcatgtcactcatctggaccacagctccctgccttgtggtgtggactctgttctctgcactgggctcgttctaaaacggagcatttggtccttgcagcctgccttgtggtttatgacttagtagattgaaaatgacagttgtgctctattttcatttggaaagaaaaaaaaaagtggaaaaccagagattgcactgatctggaggtagagagaaaactgtggagatcaaagaagatattatgtattatgaatgttacacagatcaaggcatgtttgaaataggcttaattttcctcaagttggcttttgtctcacaattgagttcttgttgacgaagaccagttattattcgtcttcgtgtctctggagtctagcacctagcacggtgcctgataaagcatggtcacttcacaaatacttgtcgaagaacgcatgggatgaatatgcatttgggtatttttaatgcttgatgattagaacattctcatggcttgttaacttgtaagacataattttcattgtaagttctttgtgtgtgcaaatgctttttgcgtggaatgcttgccatgcactgaaaaatgctttgtgatagcagttttgaaaaattgagtcattttgccctgattgaagctgggtgaccttgtgcaagtcactttaaccctctgggacttgtggccctcatctgtaaaatgggtagaaggtcagagtggacctcgtggcctgagaggctagtaccccatgctgcatgtaagtcttacatcctcctctttggtgattggatactgaccctctccccaggggttcctgcacagagctggaattctctctggtgtctttgcattccagtgggtggaatgccttgtttctcagtagcaatgagaaatgttaatgtgaggttatgaaagcaagccaagagccatggaataattaaaacacacacgcacacaaagaaggaaaagcgagagggggaaacacacttaatggacaagggatgagtaaaacccaatggactgagaaaaccccagagctgaacttcacatgaccccgcgtgctgcctgcagttgcgacacccgcgtgccccttacgctccgccggcctctcagtgatgtcagtgggccatgggccccacaggaagcaggggctgccatcagcctggtggagcgtgccagcccgctcctcctccacggcccacttcccacccacccgggtctccagataacatgaagccatagctcccaggctcgtcagcgggggaaaccaactcagtgcttctcagaaaatagaaccccagcccattagtgatgtccacgcaggcaagagatgaccaagaagaatgtttgccttttaggagttctctgcctgaaaccagcaggtttcctttagggatagggtgactgtgcttgctgaacacctctaggtcgtcagtgaatgaaataattcattctgtgcttgagtgtctaagacccagggggtttaggaataattaggatactggctgtacccttggagttctgtgctgcttgggggatacgactcaaactcacagacatctgtggctcaaatcaaggcatatagatgcagtgactcttggaacattcgagggagaatcaccacctctgctggtggaggaaaggccaggaactgcccacctagttttcccatgaccccagcctgtagcgggatatgtcagaagatttggatttagaggaacttgggtttgacaaaatagaagtgtatgtatataaacagagttgggagtgatgggggataggatgctgacagcaccttggtagtccctccccctacgtgacagtattgacttcatagtgttgttgtgaggcttgaagaagatacaagagggaagaggagcgttccttgccgtgcagatgcaaatgctcattgttacttgttctgcctctctgtgtctgtgacatccagccctgtgtgggctaccctggttgcaaagtgggcctcctgccgttgagcagctatggtccagtgggcaggtacaccacagtcatggaagcctagttaaatcattacataatagttagctctgtatgaccaatcttttctttaaagaaattcttccttttggaataatcgtagatacacagaaaaactgtacacagataatacagaaagttccagtgtacccctgacccagatgtccgtaatgttaacatcttgtattaccatggtacacatgtcaaaactcagaaacaacattggtacattactagtaacacaagtccagactttattcagtaaaccttttgaaaaataatagctttattggcatataattcatacaccataaatctgctcttttaagggatatgatttagtggtttttagtgtattaatggagttgtacaaccatcatcactatctaattttagaacattttcaacaccacaaaaagaaacctcatacccattaacagtcacttcctgcccatcccccttagccctggcaacttagtctactttctggttctctggatttgcctcttttggacatttcatgtagatgaaatcatacaatttgtggacttttgtgtttgacttctttcacttaacatattttcagggttcatccatttgtagcatgtgtcagtacttcattcctttttatggccaaatagtattccagtgtatggatataccacattttgtttgtcctttcttcagttgatagacatttgggttgttttcacttcttggctattgtaaataatgctgctacgaatatttgtgtacaagctttttttgtggaaatgtgttttcatttatcttgagtagatacctagaagtagaattatggggtcatttggtagctttgtttacctttttgagaaactgccaaattgttttccaaagtggttgtgtggttgtaccattttacagtctcaccaccaatgtatgagggttccagttctccccatccttgtcaacacttgttattgtctgttttattttagccattctagtggatgtgaggtggtatctcattatagttttgatttgcatttccctattggctaatgatattgatcatctctccttgtgctttttggcatttgtgttttttgtttgtttgtttttgagattgagtcttgctgggatgtccaggctggagtgcaatggtgccatctcggctcactgcagcctctgcttcctgggttcaagtgattctcctgcctcagcctcctgagtcactgggattacgggtgtgtgccaccacacctggctaatttttgtatttttagtagagacagggtttcaccatgatggccagcttggtcttgaactcctgacctcagatgatccacctgcctcagcctcccaaagtgttgggattacgggcatagccaccgcacctggccttccatttgtatatcttgtttggaggaacatctacaaatcctttagccatttctttttttttctttccctttttttttttttttttttttgagacagagttttgctcttgttgcccaggctggagtgcaatggcgccatctcagctcactgcaacctccgccacctaggttcaagcaattctcctgccttagcctcccaagtagctgggattacaggcgcccgccaccactcctggctaattttttgtattttttttttttttttagtagagatgaggtttcaccgtgttagccaggatggtctcgatctcttgacctcgtgatccacccatgtgggcctcccaaagtgctgggattacaggcataagccactgcgcccggccttaaaatatatttttcaaaatctacattgttcaaaaaaagaatctgtggtaactctcagaaatccaataattacaatagtaaatacaagtaaagatagacaaggaaattaggggagaagacaagaaaataggaaaataagatgacataagagttaatgttagtacaacaactaatatgttgtaaggtttgtgagattgttggaagtagcctgcacatttggccttgagctttctagcagccaagggtaaaatggaaatgtgactaatgacaagattaacacagatgtctgaaagattgtttaaaaaaatgtccccacctccaatattttcagggactgaaatataagcatatttctcccatagatcctaggaacctgagcttctcacgcacaggatcatttcatttgtgttagttctttccctttagacgaatagctctttgaggacagtaactgtgtcttatttccctcacatctccctgtagtgcttaggacaaagcatgggagatgcttacaaaatcttgattgaattctttttcaaattgggaatgtttattacattctttggcagcatttctgccaccaggttgaggttagttgggaccaatttggcggtggagaagtggcaggggctgccctcctggatgcattttagaagtgttttcttgcatcatgcttcctgagtgctggctaagcagtggaaacattgggcaggtggggttgtgtgcccttgccctgagagatggccgtcactttggagtgaaggtaagcagcattgcttcactcatgtggaacccacccgccttcccacctcctcagcgctggagggtcctctctctcgcccactccctctgacatgcctctgagactgcctgcccgatggaaatatccagcatgtatgagggaggtcctggccaaaactgaacagcttctcatggaattgggcccctcatcacctacggttatgtgtggcgcacagatggccactctgcaaagaggcccacccagatagctccctcaccgggggcaaggaacaagccaccttcaactgattacatgtcatattgggtggacctcttcgtcccacacccaataaagggctttaccatttttcagtagcatcctttcttaagagaaacaaaaaatagatttgaataccagtctttaaaggggtagttgtcattacttcgcagttgacagatggggaaatggaggttcagggtgcgttacctgcctgctctaagtcatatggtgagtgggttgcgaagacctgactccaacccagagaatcttgactttgacttcatcctcccctccttccacctgccagtacccagtctttatctaaatttagggggcttgagaggccattctttctattttgggtaccttcaaacaggtaagcacagttttctttgaagttacctctgcctccatgtgggagagtatcaacaaacagttcccccttccccctccaaaagcactctctgcacagtcacccctaggccaggagcagccttgtaatatgccacacatgttgttactgcctgtggcttttcacacctcctgtctcaaatattggagcttttttggctacagccctgtgatgaaggcagtgtgggtgctgttgaccctatcttacccatatggacactacatcatctagggtcaccctgttggttgggatctggagtaagcccagaggccaggattctgacttctggtccagtgctctgccctaggccttgagcaaatgtgtatcaagttgcactgacaatctttgaattcctggaactcatgccatgagcacttccaggagcaccttagtgcttcattacaaagatgatgagacgtaggaaagtcttttttttttcccacggaagcagaatctcacccacacccgcagattttgttgtgtcccttcagcactgagctgtgttctcagaacagaacaggtagaatagagtcaaaatgcaaacagaatggcctccctccacagtctgctttgatggaaatgtgatgccaagcaaacagaaaagttgttttggctccatctctgaggtcatttagttgctatttccatctactttgaatccacatctgctgtgtgctcagagccgtgctggttgccaaagaatccaacaagaaaaaggcatggccccctttggggcgcttgggtcctctcgcagtgccccaagcccaggtgagagacatgccctctgggccgtgattccctcatcagtaaagcaaggaagataatgtctggttaaccaccctcctggagtcatggcaaggctgatacagattcagtggcattaactcatttgttcattcagcacattttactggcaacttatgctgtgctgggctctggatatagtagtgagcaaagaggaagcactcacaagggtaacactgcaaatgctaggagtcatgcatgagaagtccagggagcctgattccatttgagcaaggggtggtggtctgggaaggttcccccaaggaaaagacattggagccaagaccaaagggtgggtaggagtaatcagaagagcatgtctctcatctctggacttctgtagagagacttctgtaaccactgtaccctctggaagtgggtacagaagtccagagatgagagagatgtttaacaacagagagaaatccacccgaaggactttttacatctctctaacatctcctgttcagtttatctcagctggcctttgctgagcaccagttagttgccttgtgcatccttgggtgatggattatggagatggcagtggttgacactgtctgagagcagctcccagataaaccagcgcactgtggttgatgggctgcctccaggtagagagtgaggccctccaagcacatcctggccatccacatcttcacatttgcagtgcctagcacacagtggacaaaagggatatactggacacgttgtcctaggatgcagattcctaccaggccttcaaggcttgtagaaatcttccctaaaactgatcatgtggcctccggtaaggaatctaagcttttgaatcttggatccatctcgggcacagggataacggtggcgcccatctcacggggtgtgtggacgttgtctcaataatgactgacgtgctgagcaagtacctggctggagaagcgtgtggtaaaggggagcagctgtgattattatgggtatcattcctagtggttctgcaattagtcttgacagtaagtgctgcaggacttcagacaaggagaggctacaggtgtggaagtgctcctcaaagcctgtgggacctaaatgggcacagtgaaggagagtcttaggtggaagcaagaaaactgagcatcaggaagggagcaagacccttggtgatgggggtatctgttctgcatggaggatagatgacttctcagccattgggaaaccagctaaccagctttctgcttgatggttgtagtaaaatcccatgattagtgacaatggcatgccaggtttgaagagcaaaggtcaggaggtgagaaagcagataaatgcaatgtttatcttgaaagaagttgtcaactacttggaaatccccaagcttacttcctccaggaagccattctggactacttcacccagttctcatagctcccgggccctccatcttcccagcactgaaacacacactgaaaagggcatttttctaaatatgtctctgcctccccttgtggagggatgtggctccttgagatctggggtcacggctggcgtgtttcgtggagtagctagaaagagtaataatcctttttgaatgcacagcatttacagaggcctcacaggctgaaaatggtaattaggatacacaattgggtcttttgacctcaaatccaggcattttcccaccttgtgggcctcactcaaatgatgaccccaggttctgcctgtgatgaatgagcaggcatggttttgttctgttaggatatgacggtagaagagagctgtttgtcagaaccagcagtggcttcagatcttgaaagtccaactccttcattttacagaggaggaaacctgtgccccaaagcaggtccccccaagttccagcccagtgccaccccactgcacagagcagctgtctccttttgatcatgaggaagccaccaggtccctggtggagttcagcagatgtgccgggtgggcgactctggtgggtgtgaggatgtttcctttcctgctgggaagtcctccaagctcttgtgaaagagatgtggtttgtcgagcatggattttcaaactttctttatagagagctgttgttagcttaaaaatgcctggaaacatgatcaagtgtaatgttttaatgataacatagaagcacatagtactaagcacatgtaatgagaatgtacagaactctctagtaagagtctgaaatttggccgggtgcagtggctcatgcctgtaatcccagcactttgggaggccgaggcgggtggatcacctgaggtcaggagttcaagaccagcctggccaacgtggcaaaaccccgtctctgcccaaaatacaaaaattagccgggcgtggtgacgggtgcctgtaatcccagctactcaggaggctaagacaggagaattgcttgaaccttggaggtggaggttgcagtgggctgagatcgcaccgttgcattccagcctgggcaacagagtgagacaatgtctcaaaaaataaaaaagagagagtctgaaattcattctttcaacatgcttgtgttgggtgctgcctggcacagcaattggtgcccactaactcacagcgtcggggaagataggcacggaacaagtcatctggtgtggtccctgcagtgggggagcccagtgagggcctgtccagcccagctgagaggagactgagagaaggctaggtggcataagtaaagatatggatagcgctttcctcttcagagtgtttattaccagggttagataaagcagatctcatgtattttctgctactaagtagaagttcttgttttgtttgatttctggtgggctttgatattttccaaaaagataataactcattgtagagtaagatcaggactggggccagcagacttgggtccaaaggtgtgtcatttttataccagactagaatcgggtgaggggagatgtaaagagatcactattgtcacggaaggcgctggaaggagctctgcttagaaaaaatgcctttctctaggaggttttcatccagcatgggaacacaaaacaccagtttaaaatagctaggtaaggcttcacagtctctcaatgtgatgtgggtgtcctgagtcgtgaacatcccattgtgcaggataaaatgctggtttctgagctgtctttcaagacacaacccaaatgctgtctttgccatggtgccttccttgggaacccaagccaggtgaggtctgccttttctctgatgttgcctaacttttcctctttgtgtcccttgagctcagggacatgcatcccctgttgtacctagcacagaatcatgcacaagcaggtgcttgttaactgttggtgtgtaccaacaaacatttacggagcacctattagcaggagcacaggccaaggagctggatagatgagcgtggagtttgggggagaggtctgagctgagatatacatttgtgagtcatcattgtatggatgaggccgggctggggaggatatgagcgtagaatgagaaggtccagacctgcacctgaagaacagccccatttagggaatgcagggagagacagaggaaaagcaagatggtgcacagtgacattgaaggtgagtgacgagaccctgcagcaagaggaaaggagcagcagtgctagatgttgcagagaacccagaatggtaaggcctgaaaaccatgtgttttagattctgtaacctggaggccactaggtgaccttagcaagggcagtcatgatggagtgttggggctgaagcccattgcagggaggcccatagtcaatgggaggtgggcagtagacacagagagctgggttattcttgccacacagctgtgctggggccatggcgggggtgggggtgccacagagtgggagccagagagggacctgggtaagggctgaccgtgggtggggagcgcatggagtgctttcagaggccaagtgagtggaactgtctatgaagcagatggatggaaccctggctgaattatctcagacttgccaaagacattcataaaattcagacccgcacacactcgggaatgggaaaaatgaattattttgtaagaagcttatagtccaaaggtagaattgcccaagagagcttctgaaaggaaaaagtcatagcaagttgatatttttaaagtgaaataacataggttggatttttctagtaacttcaaggggtaaagactttgaattttttttttggagacagagtctcgctttgtcacccaagctggagtgcagtggtgcgatcacagctcactgcagccttgacctcccaggctcaagcaatcctcctgcctcagcccctcaggtagctgggattataggcacacgctaccacgcctggctattttttgtatattttgtggaggtggggtttcaccgtgttgcccaggctggtctcaaactcctgagctcaagcgatctgcccaccttggcctcccaaagtgctgggattaaaggcgtgagccactgtccctggccaagactctgggtttagtaagcctcttgcaactcactaggagtggatttctaggacctccccactttcttgcttgttgtttcttttgctagccgtaagtccctggagtacactgggtactttatgggaaaaagaggaacagtgtgggacagactttgccctgagctgcttaacgtgatgtggggaacagaggtgataagagcctgtggcagctcaggcagccctgccatgacctggagttggggaggggtatcaaggataacaagtcttatacacatgccatgctgtttctttggatcaatagatggataatttttaaaaccccctgtatgtatcaaactcactttggagatgtaaggcatggcctctgtcctggtgacagtatctgagtgggaggcctggtaaaatgtctgtgtttaggatgatgaacgccataatctaagactgctaagtgctgtggggtggtctagaagggcagatgggctagctgcgaggagggcagaggcactgtgcaatggtgttgcctgggaacactccgtggagagtgtgggaatctcaccctggccctaccaggtaagaaattgggcctgggaaattgggaagggaatttttcaagcttcatggctgctccaggacttgaactaagactttcctttagagcaagcttgtccaccctctggcccgtgggccgcatgtagcccaggagagctttgaatgcagcccaacacaaattcataaactttctgaaaacattgtaagattttttttttgcgattattttttagctcatcagctatcgttagttagcgtattttatgtgtggcccaagatgacgactcttccatcgtggcccagggaagccaaaacaccggacacccctgcttagagaaagtgcgttttctgttataaaaggaccttgaatccccatctcatatgttgggactttgtcttgcatgttttcaggcagggcatgattgtatctgtaacataataatatgtaagaatgtgtacttcttagcctttgcagagaggcgggaggcctgtttcctgcagcccccgccctgtcctggctgaggggtgggaggcagcttgctggccagccccgctgagtcaccctccggcgtggagcccggtggggatttccacgcggccccagtgttctcttctcctcgtttcctgttgggctgtgacgcaggctggctgccagcgggtgccggtgggcactcctgacacaggccactgccagccggccttgtgggtcctgagggcatcgtgggtggctctccccccacgagtgactgtgcctggcagggtgtgccccacatgtcagttgcactccgttctgggtgggcagctcccagaggccccggggagggctgcagatgggcggggggtggctgcctgagaggacgggaggttttgttgaagagagagcttgctcttggggcagtttgtactgggcgtttagggttataaaaacctagatttgctgaaaacggctctcttttatcttctgacaagaacatttgtgaagaaaacaaaacagaccttcagccatttagtctatacaccgagagaatggtttctacagtatgcctgatttctctgggtctttctaacacatccatgtatgtgcttgtcagcttctagtgcctccatttcttgatatgaggaaattttgcttaaaaaaaaatctctactgataggacctctgcatattcatgcatgtttttcctccagaactttgtgtcccaccactgtgctaggcagtttacaaatgccatctgatttcattcctgccacttcagtctaaggctatattgtccgatacctatccaccaccctcatgtggctatttaaatgttgggtcattaaaattaaatacaattacaaatgctgtccctcagtcacaccagccgcatttcaagtgcacgggtaggctagtggccatcagatcagctcatatagagcagcacgttttcatcaccaccaaaaattctattgggtagcactggtctaaggtccggacatatgtccccattttgtagatgaggaagctgagtcctacagaggttaagttgaccacttagaagaatgaacagatgaaaccttttcattttacacatgaggaaactgaaggttatactcccctttccttcttagaaaagagaaattgatctgtaggcttcagggactcttcagttagcctgggggtactgtgcgggtcagctcttttgctgttccccccagaccctgtcagctgtgggtggtggctggtttctcttggtttcctcaccagagtttgggaatgagcaagtcaggactgctttccgtacggtaatcctttggcccatttcctatcgggggatttatggagctggtgatctcttgggttttttggccatttgttagagccaaaagaggtcacaggaaatgatatactagtttcattgcccaaaatactgaggtccagagaggtgaggggatgctgagggtcttgcatctagctaagagctgagctggctcttaaacttgttttcaagccaggacttacctgactttcttaggaaagtaatcactccatagacaaggataggtttttttcacagagcaatgatgttccctgtggtccctatgtagggtggtaaggaatagggctttgggatcctacagaccagggttcaaatcctggccccaccacttgtaagttatgggacttcagacaaggacttaaacattctaagtcctcagtttcttcatctgtaaaacagggataaaatatctcagtgaatttgttttaaatacttgcgtccgggcatggtggctcatgcctgtaatcccagtactttgggaggctgaggtgggaggatcgcttgaggccagaagtttgagaccagactggccagcataacaagaacataacaagatctcatctctacaaaaaattaaaaatattagctgggcatggtggtgtgagcctgtggtctcagctactcgggaggctgcagtgtaaggttgcttgagccaggagttaaagtctgcagtgaactcaccactgtactctagcctgggcaacagagtgagaccctgtctcaaaaaaaaaaaaaaaaaaaaaatcagccaggcgcagtggctcacacctgtaatcccagcactttgggaggccgaggcgggtggatcacctgaggtcaggagtttgagaccagcctagctaaaacatggtgaaattccgtttctactgaaaatacaaaaaattagtcaggtgtggtggcacacgcccgtaatcccagctactcgggaggctaaggcaggagaatcgcttgaacccaggaggaggagtttgcagtgagccaagattgcgccatcgcactccagcttgggcaacaagagcaaaactccgtctcaaaaaaaaggaaaaaagaattctaacatgtttgagattgactgcaattcctagcatattacaagtgttagtaaatagtagccattaatattatgagcttatcatcaccttcagccagcattctaattttacagtatagaatccagtacataggaggcactcagatagacgggatgccccaaaattgggagacggacaaacttattttgaaatagtctttttttgacatttccaaagaatatactcaatgtttttctgcaaccctttgccttctttttaggtgaaggacctctacatttaaagcagtgggttcaactgctaacctgaaaagctataataaaacatcccagagtatccaaaaagcctggaaacaaagggaaaatagtgtgtcctgctttccaactttcggatatgctgtagaatagactgaaacaaatcactggaaaataggttgttgtcgattttatttagaagcttttgttcctttggattttcgtctcttatttttagacagagtctccctctgtcacccaggctggagtgccgtggtgcaatgatagcttactgcagcctcaaactcctgggctcaaatgatcctctagccttgatctcctgattagctgggactacagaagcaggccaccacgtctggctaatttttgtatttttctgttgagaagaggtcttgctatgatgggcaggctggtcttgaactcctggcctcaagtgatcctcccgcctcagcttcctgaagtggtaagattacaggcatatgccaccacacccagcttttttgttcctttgaaagaaggcattgctaatgattgccctgaggtgtctagatgacccggccagccatccacctctgcagtttacacagcttgttgatctccacagtgagaattaacttcacaacctgggtccaagaggctggaggattgtcagtctttagaaaaaaaaaaatctattatctttagagaagatggacttgttgaggaagaagagtagacaaatactttctggaaatattttcaaagggaattagaaaaagaaaaagattttggttgtcctttggtgaatgagaatattcatcagcagaatgcctcattaccacgtcacacagctgaccaaggcctcatctgagactgtgtttgaatagaaattaaacagggctgacagtgaagtttctgcttttaattagctttcaaaggtacacctctacctgtgatgttgaaacatcttgaaaaacctcactgctctgtgcctgaatgaggggcatctagagggcttggaagagaagatgtggcacagggcagccggggagaggctggtggccagaagatggacctgagcttggtgaatttacctggcatctgagcctggcctgaacaattcagaaacctcatttcatcagtcttggagtcagggctcctgtctcttagcaaaaagctaaagcatacatcaagcatatttattgacaagcgtaaccactgtgaggttataaccagggtgctctgtctgcttatgggcaccccacccgaccagccaaatggtcagagagctgggtgggtcggggaaagggagggagggagtcatgggaagcagttgtgttgaatggctacaggccctggtggctgggtgcatccccgtatgccatccaggcccacccactgctgggccggaccttcccctctggacagttcttgcttgggcactgactgggtttgctgctgaacctcctggcctggcagctctggttgctgatccacccgcttctttctttatagagattaagagcggctccagtgtgtgtacggagagcctctttgaagcgctgttgcctttctgtggctagatccacgatcttctctctgggatcaccccataggacatttgctttccaccttctccagtcccagtgaatgcatggacctctgtcctcattgttactggctgagccagatgtcagtcctgtgacctggcctcaggaccactcttgtagcccaccgtgggtggatgaagccggtgggaacagaatgataggagttaaccactttttaggcgttattgggccttttcactttaatagcttaacagagacatctgtgatggcttgcatccagagtgcgtggtgtttatttttgatttgaaatatgaaaagcatttttttaagacaactgactcctctgagtcatgcccaggggagcaaacggcctgaaatatgagcttgtgcttgctggaggaggatgacagaggagcctgctgctgagttcactggtgctggggttaggtcactgctgggctgaagcgcactgaccataagagcaacatgtgggcaagagccgcggcactggggtaatttattgccgccgctcgcttcaccaggaaccccacacgctgggttcccacaggatgcgacattcccacaggatgggacaactgcatggaaacccacactcgggcctgtgttgagcaaccacgtttgagtaagagttatcttatttggcagggtgggttaggtgtggggtatttgtcactgagaagcagaaactgtatgctcgacacacactccctgagtccttagggaattgcgtagtttttttcttttcttttctgggttcatcttaccagcagtcgtgtttgagaatgtgcacagctcaccttcgttcagccctttacagtttacctccatagccttctttgcgtcttggcaccatcttgcgaggtgtcaggccaggtgttaggatgctctgtttacagatgaggagattgaggcatgagttgtgattgctcacaattgcctcctgagtggtggggccatgctggggcactgtgcccagactctagacttccaggggtccgggacctcctgctgccagtctcctagcccgttaccacagctgtctgtttcttggcctctccctagatttctaatggaactcttggggtacagtctggaaataggtattttaaacatgctttgcagtgattgttacagatcttcatgttcaggtggcccaggggctgaccctgctccaacttccccctcagacattaaacctgtaccacccactgagatggttttgattttctattctgcatttaaggcccatcttcaccccataaatgccagctccccaaggacagagccctttcctgtcttgtccacaccatgtcccagggccctggacggtggttggcacacagtaggcccttggtaaatgtttgtcggatgagtatgtctcttcctcagctctgtggttagctgggagagctccgacagtagagtctggcaggtctggttcaagcatccctttggtgtaacatggtgtgaatggtggggcctcactgaattgtggagtggggggcagtgtgtctccctacgacctcctggtgaggagaagatagtcaccacccacacaggcacactcttgaatattccaggacaaggtgggcactcattagagggcagctcttacggccactgcctggtatgttttggcgtgagcagtagggtcatcgtggtggtcagtttttccactgccatcaaatgggatccatttagctctcagacagacaaggtatagggctggactctgtgccgtgggctaaataccggccacctcgagcctcaaatcaagcccagacaccggcataaacccaggtggcccaagccgaggtcgctccccagggccaggctcatgaatggataagtaaatatttaccctgtctgaggtcgaatgtgaactgtctaccaggtgttttgtttttctgtctcctccctctgtttctgcagtgcctccccctgtaaaaaaggaaaccaagaggctgacaggttaagtgacgggcttgacacagctagccatcagaacgtcctccagtcccatctgagtcctgttcctcctcaggcacctcctccaggaagcattcccagatgactggcccatcctgccctttccctcctctgagccgcaccctgcagacggccctctacctgtgaatccatacaggatgtaggcaaaggggaagaggtttgctcatcctctctccttcacccttgtgcatattaatactcacctggcaattagtcatatgcaactcttatattgaccttacatgttccgtgtcttctgtgcccgtctctggagttcctgaagatgaagggctgtgtctgctgcaccttcagactttttgaaattgattggttggtttgtacatccatttattcaccccacccctcatcctactgtacacgcttatggtcagtctattctgtgtcgggctcagggcctttctccccaaagtgcgttcatgtccaaggctagagtggatggctagaggccagaggacagcttaggctgaaagtggtagggagactatcaatgaagctggggggagctgagcttctgaaacttgggaataaattttcagccttgctaatgtgttcctctgaaaaaatatcttatcaggccctcagatatccaccagttctccctttccaacttgcagcctgcacccttggccaggaagttcataggcaacaaaatagaatccaccttccctatcactcaccccttttaaaatgtgactaactctgagctaaccaagccttggccagacgtggatatggttatgcacggactccgttttgtggtttgtcatttctgacttgctgggaaatcctttgttgggggtggggatgggaagtagagcatctctggggctggagtttttctaagatgtgtaagatttagaggctgtcatactgcaaacagggagagcgggctgtctgcttggcttcatggtcagtggagaacagcctggacttggagtaagaacagctaggttcagatccctgcttttactcctgaccacttagtagccttggccgagtccctcaacctttttgcctcagtttccttatctgtaaaacatggggttcttgaaggattaaaagagctggtgtgtgtaaaacccaggaacatagttcctggtgtatagtgacttataatttcgaaaaccttaagattttattcataagattttttttttcaaggccaacttaagatttctaagagtttgtttttcaaagagctggggtcttgctttgtcgcccaggctggagtgcagtggtatgatcatagctcactgcagcctcaaacctctgggctcaagagatcgtcccacctcagactcctaagtagctgggactgcaggtgcacgccaccacacccagctagtttttaaatatattttttagtagagtgaacctcgccattttgccaagcctggtctggaactcctggcctcaagcgatcctcccacctctgcctccaaaagtgccaggattacaggcctgagccaccacgctcagccttctaaaagtattttggtgtgcaccattagcactgtgtcttaaaggcgatgtgcaccttgagcacagagtgttgagtgcgtggtggatggatgtcatttgcgttttacagatgcggcaacagaaactcaggcccagccacttacccgaggccacatagtcccaggtagagttggaatttggaataaagcctgctgactccaatcctagatgccttccacactcctgtccccctacctctacaccaggcgtccccaacccctgggacccctgggaagtgatgtgcacttagcacctcactatgggaaacataaagcaggaactaacaggactcctctctcaagaaggaatttcagtctacttggggaaagaataatagccaagcagtaactcaggttggtttagccttctagagcagtgttgccggatatcactgtagtgtgagctacagtgtatggtagcccccacttgttcttggttttgccttatgaggtttcagtcagctacagtctggaaataggtgaatatagtacagtcagatgtgttgagagaaagagaccacatttatataacttttatgatagtatattgttataattgttaatttcattattagttattgttgttaatctcttactgtgcctaatttataaattaaactttgtcttgggtgtacatgcacaggaaaaaacacagtgtctatagagtttggtactgtctctggtttcaggcatccactggtggtcttggaacgtattcccctcggataattgcaattacttctaaaatctaaaatcttctggccatgttaaaatgtaaagagagggtgaaattaattttaaatactatatcttgtttaatacagtatatcccaaaccatcatcactttagcatatactcaaatataaagattgttaacgagctatattacattcttctttatcatactgagtctgaagttgatgtgtcctttatacttgtggcacatctcagtttgcactgtccacatttcaagtgctgccatgtggctggtggccaccatattggacaccacagctacaggatttcttcgttaggtcagttgatgtcacctgcattttggagtggagtcattgagctcactggctgagttacacagctagtgaggagccgggtgggaccagagcttggtcttcttcccattaaggaagaagggaaacttgcatttgctgaatgtctactatgtcccaagtgctgtgctagatactctacctttgtcattccatttagttctcacagcagccttgcatggtggatgaatatcatgtgcattttacagatgaggcaacagaaactcagagaggcccagcaacttacccaaggccacgtagtcccaggtagagttagaatttggaatagggcctgctgactccggtactaggtgccttccactcacctgacctccttctcctacaccaggggtccccaaccccggggccgtggactgataccggtgtgcggcctgttaggaaccgggtctcgtagtagtaggtgagtggtgggcaagtgagcattacggccagagctccgcctcctgtcagataagcggctgcattagattctcataggagcgtgaaccctattgtgaactgcatattggagggatctaggttgcacactccatatcagaatctaatgcctgatgatctgaggtggaacagtttcgtcctgaaacatcccccccaaccctcatctctggtgccaaaaagattggggaccactgccctacacagagaaagagaatttgcacgtagcaacttaggcaaagtattcaaggaaagtgccaggggacaggaaggacaccatgggctggtggcctgttcagtaacagcttcagggtatcagttcagaaggcctaggcctgctttggttggggtggtgtatgtgtaaaagcagcattctgtctaatcacaggttctgcctgaaaggcagacacttttaacccttcggtggacagggttggtgatagctagtggggggtatgaggtgggggtgaggaggtggtggtgggcagcaattgcagaggccagagatcttggctgtgttctacctgccatgctgggaatgctaagtacttctcaagcctccaagcaactgagactttctgctcggggaatccccaaggatttggggaggctggaattgagcaagctcttgaatgcatgcatggattcatgcagtcactcactccacaaatattcacgtgctttgggccagaatgatttcggcaggaatatcttgtcctacatgctattgccatgttctctgaggacccgcggcttcgcatgtgtaaatctccctccagagtactcggcagattcccgaagctgactgaggctcagggagtgtcagtcccttgccacaggtcacatagtactgaatggaagatatgggacctcagaaccaagaggctttgactcatttgtccctctttctgtctgttttgccatcagccaggagatagtcgttgagttgtttctatttgccaggcatcgagctgtgttctcgggtttcattgttgttgttttcattttgagtgtgtttgttttgttttacttttaggagcaatcacagtgctcctgttgctgaatggtggctgatgtctgttgcatgccaagcactgcgcagggtgctggtcacagtttgctccagggattcctcccagtcccgctgtaaagaggaggaaactgatgctcagagacttggacctttctgaacatcatgaagctagggatttcagtcccagcctctctctcgagagccctaacttagccactatacctcactgcctctctgtgaccagggttgagtcctggtcctcaaatgaagcccgatttgccagaaccttcttttgaggccttacctggtcttcagttttaccacgtgttaattgggggcagggcagccagtccatcctcttctgcagaaatcaccctgtccaggagatgggtgcttcttcaggacactacctggctaagaacactgcattaacaggagatagagatccagtgtgtgtgaaccttgtgaaaacatctctgtctgttcctccaatctcccccttctgtcttatcatgcagggcaagctcaggttgttgtcctgtctctgttgggaggacccttgagtggtatctcctatgcccaagcagacctgcagagaaccctgtccaaactgatggtcatctgagacatggaacttcatgataggaaggtgtcttggaggataactagcaagtctttcactttatagagggggaaactgagtcctcagcgatcagccacatagattctgtgttgtagagacctgaggatgtgtctcatctccttatctgaacagcaagttcccatgctgcgaacgtctcaccctgaccctcaccgtattttttaggaagtgaatggggctttgagaaggacaacctcactgttttgcccatttctgagatggaaaatcaaggaacattgccccatctccaccccgggaatctatatgcccctcccataggcaagatggaagctagaccagaatgtgcagcttgtgcttcttgcgggaatggtgaggacagatgagggcagggagacagcattcctaaacccagccttttgacccaagaggcagggactccaaggctgtagaatgggaggaattgtgggaggaaaagcactgggcagaaggtctcagtcaaatgcacctgcagttattagctatgtgacttgggcataatgccacctgtgagcccccattttcctcactaggacagtgaactcaccaataggtttgagttgttgccctcccagaactgttgcatgaattgaatgaggtgccttgcttaactgtactgaatactggggaagcctgcttaaatggatgacaggctttttatcattagcaagctgccgcactccccactcatcactccaaggcagaccattgcattttctttcattctgataaactccttgagttgaacagaaatcagactccccgtaacttctgctccacagtttaaaacagcccaccatgaagccttatgtccttcaggacattctgccctgttcacttggatttctctcctccctgcaaagcatcatcagcttcctcctctgacccatgttttgcacttccttgcttgtcactcctctttaaacacttgtccaaactgtttgtggcccgtcctgtattacgcccagggcagatgcagtagcccagcccaagcagcagagaccatggcctccctgatgtggggtctgtgcctcttctccaggcaagtggctgtgacagtctaactttatggaagggtgaactcaatgacattggctgaactgctggtgaacacgggaaaagcccttctggacctcttatctctctctcctggccagaggaaaaccatgtcccatttgtcctgtttgagcactatcaggcctatagccataatcttttacaccgtaacataactttgccaatgccaatattatatgccctttttttttttctagaaaaacttaattgggattttaaatgcatttgggggatgggctgcgtttctgtttgcctctaaaaacaatgagaaggcaaacaaagtatgatcctatcgccagaaaaatggagccaaatctgaaattaatttacaaagtcattagtattttccatttgtgacccccaaaatgaatgtaggtgtagttccttgcaattaactgcaaattaggaaagggttgggaggatgtttcagggaccaacacacagaactgtagcagaagcagatgggggaatggaaccaagaattgccttggttttcactcaaggccgtggtttgggagagtagtgccgactcaaatattccccagaagagagcactttttcaacagtctgaaaagtggcagggacctttggaatgatctgttttaaccttttcattttctgaatgaggcaactgagagattcaggaagggtaagcgacttgcctaaagtcacatagccaggaaggtcagaaccaggaccagagctctgcttctgactccctggccagtgctccagctgccactgcccccctctctcctgggtgcttgtctgcttgtgcctttaatgttcagcacttgagatattttcacgtttagcaccttcacgtttagcagtactcctcattagaggaaaatgggatgatgtgggcagagtcacccacagagtcactccaggtttcagatgtgctggtgcttaccgagtgccacagggagaaagtggtggtttctcccttcccttaagaaacctggttatttccaaggctcaacccctgcaacgccccaccaagccagtcacccaccactgcacattgagaatctgctgctctgtgaatgaaattggcctggggttaatgagtggtgaatgtgtgtcagtgtttggtatttgcagcaggagctcttctgcgattccctaagctcagatgaacggggcctttaagatgccatccagccatcggagagatgcaggaaaggccttttgaaatgctgtttcccctgacctatttgaggtgaggccctgtgatgtcatttccccagtggtgtgtgtgagagagcaagcagcactaagaaaagccactgctgagagttcacagtccttgcttcagtgttgtcttacgctcggggtgccttaaagggcttacagcgaccctacctccagcttctccagctccctttccttggcaaacacttgacccatcccagccccttgggctttctttcctcctcctctgctaccacatactgtgggtgttgggaaattactaaaggcgcgactctggctctcaaagactctgaagtccaggatcgagaagaactgtgtttacacggagttgtcaaggatcattctgccaatgataacctattagcgtgcaactctgtgccaggtcctgctctgggagctttatgtgtgctgttgcccctcacactcacggcagaggtgagacagaatgctgagagatttctgcagacaaggaatctgaggtttaaagaggcaatgtttgatgagccactgaggggtggggctgggattggaaccgaagctggctgcccttcagcccccagggtcctgctggggagatgtacccagggggtcctgtgctgggagagtggaagcaggggtgtcactgggggctttgtcctgggagctgggcaggtgctagggacagagctggcctggttttggagccacaggagagaagatggccgggaagagctgtgtttggaaggttcctttctgtgccaggggtcagcaatctgggttctagcactgagaggggcaaaacgtgggtttgtaggggagagagggtgacccccagtgagggtaagaaagataagctccagtgagctcttctcaccctgggtcccagcctgtaccaaaaatccaggggcagcccccgggcccagcctgcccccttcacagtcccctgactgcttgaggctgtgggccagtggctttgccccttggaagcttggtttcctcatctgggacagaaaggggtcaaaacaccctttttcattgttaagattagataatttgagagccaaaacttcttgcagggtgcctggtaccaagtaggccctctctaaataaataaatgatagttttcattttcccttccacttaattgtttttttttttaaaaaaacttttcttccctgtaataacaaatttcagaagacaagttaatacattgctgtgtatactctcaggccaagaatttcctcagtgtttacataccagagcagtactttgaactttgattttctcctctgcctctgtgctggttcagacaccctctctaagatgccagaagcattgccctgccttggcctgttggtggtggggtatgtgtgtgtgttttcatcgtattataaaaacgtgaaacatttgaattacgggcaagtggtattctaccagatttaataaacgttaatattttccatattcacatcaggtatttgtaacatctctttctttactaaaaataaaaaccttctgctgaagacctcctgttactccaaccccttcccccttcttctcgctcccgtttcacaggtgtttactctcttttaaattggtgtgtgtccttcccagctagaattttgtagtgtattatttgtaaagccaaataaccccactgcaatgtgtttgaaccaccaaagcaaatgatcaccttttgggaaaagaaggctgaatatccaaggccagatcagtgattcgagatcacagaacaaacctaactgctctcaaattgaaatctcaaaattataaattcattgcctttgacttaaaacttggaactttcaaccctgcataattgcagatacattaaagattgtgccatcttgagctcccagggtcatctgaacctttcatgtgaggaaacacatcccagagtcagtcattctttttttttttttttcttttcgagttggagtcttgctctgtcacccaggctggagtgcagtggtgcaatctcggctcactgcaacctccgccttccggattcaagcaattctgcttcagcctcctgagtagctggtattacaggcgtgcaccaccacacctggctaatttttgtattttttagtagagacagggtttcgccatgttggccaggctggtctcgaactcctgacctcaggtgatctgcccacctcagcctcccaaagtactgggattataggcatgagccactgcacccggcccagagtcagttattcttagagcaggtgttttggcttttgtctttaatgcttccctcccgactttaacataactgtaatatataattattgtggaaaatttagaacacatggagaagtaaagagtgaaattgctgactgccctattaccccaacctccaccctatagagatattttctccccatccccccaagggcagaggatggagatccctgggcttctccaggtggggagtggtaccatggtctcttcaggtttcgtagcagacaggccccattgaccataggatatgtgtccccaaggtggttagaggccatcacctgcctgaggtcagctcaatgggcagggctgggcatctcctggtggtctacccaccatgcctgttcatcaggctggggtctgacctctttctggtgtctggtgctgatctaggcaaggtgacaagtgctcaacagaggagtcctggttccttcaaggaagctgggaagtgtaagacggagcaggctgcgtttgtggtttttgccaaggcttgacttttgaccacttttctgaaaaaggacaagggtgtttttttgttttgtcattttttttcccagtagatgttcctatttggttcacagatataaacacttgaaccaggtgatatcagcactgcaagttgatttagtaccacagccattttctgtgtaccaatatgaagctgttccttcataagttcttccttttcgcttttttaaactgaaattattttcattaggatcactaccttcccatgtgcattttaccacaaaatttggttctgattctgttggcttgcttgctgttagtactcatgttagcttctgccattctttccaccattgtcctgggtaaaattttgcatatctgagttgttggattctttcatcagtttttggttagtgactttcatggtctgcagttttagttgctttcagttttattttgtgttgaagttttttctatgaggtttgattttttcagggtcagtttttaaatgtagcaaggagtgtgctttttcagtttgcttattattttcaacaaatgtttttggtgggtaattttacctttgttgatcaccagctttgtttggggtgcatcatttctctcaagccgaattttctctggtaatctggccagaaggcccatagggtcagaatggcaggtcaaaatgtcttggtgctttcttgaagagtttgaaacaagcttgcaaagtactgtcctccctttggatttctcctgtctgggtgttgccagggctcttctgttagcgacagagaaaataggaggtactagaattcggacttctaggaagggctgtattgtccttatcatcagaatccctccctcccgtccctgtgacctcccaacttcacaaacatgtcttgcctgcaccctaggcaaacgtggaaaggcgcagctctggtacaccggaaagcatggtggatggggaggtaggagccccgtgccgggacatgtcttttctctttcttgaactcgtctccccacccgtccacagggttgctggccagagatctgtcagagtttctccgggcttctctttctccgggtggggatgtggactcttaggatgtcaggaagcaactgtaggaaaccccctgtgtgggtgaagcagaggcgtcgctcagggccctctgcctggttctgggctctgggaccctgctcccctcccctgaaccccccctcccccggccccaggatggagcttgcttgccatcgcagtggatctgcggaagagggttccagagtgtggggagagcgtgctggggaggggagctatttgttcctttccagtcatcgctgtactgagcggttccctgggacagttgaacccaggggaactgaattcatctgtgtaagtaaacatccatctccccttaaaggaaaagcccctgctcagcctctctgggcagctggaatgctgctctgtgggtctgggcatttgttccttctttctttcttcctttgatttcttgctgtctccttcaattaggcctgtgactgttttcacatggctatttgtatatacaagccatgccaggcatcataatttgtgtttgtctagatcaataagagcagctttaaccaaaaagtccagctgagaatttataaatacccctcacctcctcccctccctggaagatgtgaaaacaccatcccattaaccctccaaagcagttggttgacttgatcagggaagatgtgaaatataatttctttgaatgtgctttctctttactcttttagtggaatttgatcagtgtttaaggaactgtagccgattcccagcccacttcaaagcaaaagcccttcactgtgcctatttgcaaaattacctttgagagactgaagtgtcggaaatgcatttagacacagattgtgccttatattagctctccgttgccccataaaatgggcttgggcatatctgaggcagctaccaaaggaaacttaaaaacagattctggcggcagcgattcttgtgttctgtgctcactgtggaaaagaagggggctagagggatttaagtttacgtggatcttgaggattttaagaaccagatttcttctctttgctcacattaggggaaaaaaaataaacctcagatgccccgtgatatctcgttacgtcaggttttcctataaaatgtcaagacggcaatattaggtttcctggcttgcttttccccactgtgtctgctcttgccagaatttttattagggggaggggagcattctctacccctcctccctcaatgaaatcatttcttccctagcctttaaccctttaaagtttgggaagggaatactttgattttagggttaaatagaaaacttccttaatgactgtggctggaattaaggtgtacttaaagctgtagcagccctggtgggtcctgggctgactgggtgctagggtttggtatggaaagcagcttgcatcacctgcttttcttcccatgcctgtgccttccccaagctccccctcctaagccaggtacgattccagctatgttaaaaggccctgggaaatgttaactgatcaaaaatgctgggtaagtagaattattatttcaccctgaccagcttcagtcagattagcatatctgctgtcaccaggtatggcacaggcatgggtggaagctgtgcttggaaagtgaatgtgtttaggccaggtgtggtggttcatgcctgtaatcccagcactttgggaggccgaggtgggtggattacttgaggtcaggagttcaagaccagcctgaccaacatgacgaaaccccgtctctactaaaaaaaaatacagaattagccaggtgtggtggcacatgcctgtaatcctagctacttgggaggctgaggcaggagagtcacttgaatctgggaggcagaggttgcagtaaaccgagatggcaccattgcaccctagcctgggcaacaagagtgaaactctgtctcaaaaaaaaaaagagaaagaaaagtgaatgtgtttgctggaagctgtgcttgattaagtgaatgtgtttgatccaagagggcaggggattctggaagagacattaagtacagattgatgagtgtcttgtctcaccgcaaaaacctcctttctctcttccttcctagtccccactgaaaatggagtggtgatagcttagttctcactttggtttcagccaagagaaatggtacccaggaggtagagttgagtagagactcctttagctctcttcttttttctaacttctctttattccaccgttctctctttacttctgcctaccttagcagcatgctgcagaataaactctgctaggaggaagtttgaaatctccaggctgagaaactatgcagagagcaaatgaccttctgagggctctgggtacagaatccttggtatgacaggtgggtctagagccggcagagactcaaggcagcctgacaggacagtgagagtgaaagggaacgctattaataatgacaccaggtcaacacatgcgaacccaactgtcctgaacaaacgggggtttgtggttgcgctacaaaacccaggcttcagtctcttcgagttctgttttgatttggaaggagtgacgccttcccctttggaagcttaggctagggttgcaagctgaggtgttcacagggacagacagagtgtgggaaatggggcctggtgtaaggaaacggagcagaacttggggttcattcatagtctaaagggggcattggcaagtcggcatcagacagtagcaacttgttgccagatcttctgagtttttttcaagagaagccaaaaatcaagatttacacacaaaatctcccagtttgtaaaagttggcaaccatttaaaaattttaaaaacgctctgcaggccaagcacaacatctgtgggcagtgggcagctgcctgtttttgacctccagcccagaccgatcaattgatggctgtcttctgggtctcccaattccggcaacgggaagtttcttaaggaagttgcctgggctgaccgcaagtgaggtggggaagtggaaagggagcttgacttggcttcgattgatcatttgcacaataaatatttattgagcacctgttatgttcaacgtactatctgtgttgtgccatgtttcctagtctacattttgggatgagctgtgtcttcctcatgcaggtggactctttatgccctgcacagggatggttccatgcttctccctgagattatggccaagatggatgcagtgggaggaacttcagtgggggaatgttggggaaagacctgggtccgattctcagaccctgtaaagttcattgtatttcagcttaacccagcagtagtccccaggatgagacagtcttcagctgaggaaagccctggggatttggaagctagagcagagagagtccagccagggacccttgtctggcagtccctgaaggctgtaccaggaccaggcggcaaaaatcacagaacagcctccattcagctccatacatggcagaactttctaacagagctctgtaccttgtggttgttggactagatgatctgtgagctgtttttcattacctggaaagtccgataccttgagtccaccccccatacacccattagactcctgagtcttaaatctgctctggttcatggcttacctcctgcagctgaacttggggttgagtgccccagaaaagccgatacaaactctaagttgaggccaactcagtttgcctggggatgaggtggggtggtatgggggaataaaggcttctctaatgctgtgaggtgtcattcatgttttccattctcctgctctccgaatttaaattagggtcaatcatacaaacctcacaggcttgttcagtcaacaaaggcacagagagcttaagtcacttgctcaaggccacgtagcgaggcagtgaagagctggggcctggaccagctcatctgtcatcccccgctcttttaccccctttcctaaactgttagattttaatttccttttggtatattcattcttttgtgtgtctcctccccacaccccccccaccattgtttctagaactgtcagtgttcaaatgtttaatagctaggttttttttttcccccgtacacttggccagaagtaggaattcatcaccatgtgtgaacatttactgtacctccatggtttgcgtggaattgtactagaaacactcaaccccggggctttgttggcaataaactaggtctttctgcagaacttttgaggacaaatcaccaatgggttggaaagcatttccttcaggaatggcgaaactctatttttcaccttgttaatgctgctcccacctttgtttctcccctagtgtcagtcttaagtgtgttaagtgcttttttctgctcagtgtcctagataagaggtttccaaatgatgtcccctgatctgtaccccacccccaattctcaggcttctggatagacagagaatggacatctggtttgttttggaatgacaggctagactagaggcgtccagaggcctggtaacggcagaggctgctggcatcttaagacattcaaaaaccactgtgctaaataacagtggagatatattgatctcaacatttcaaggagaaaagagcttgtgaaataggcttgtgatgtttgtgataagggccctgtggggcagctggtgggcaccccatgtagagctggaacacagggacatgatcccatgtgcaggagacagctccagcctctgcatacccgtcggctcactcctgggttggaacatcctcctcattttctctggcatgtccttttgctcaatgaatcattcccggccaggccagacgtccttgctggagagccagctctccgtgcaccagccctgtgattctctaatgccagcttgaaattcggtgacccaccttgggatgctttgcctgtcaaggtttttcaatgatgaatagttgttatgagcatgtcagccagaatggtacttttcaagtcattcagtaatggatctgtatgattattttttgcacaaagaactaaatagctaagatactattgtggcagatatgccataagtaccttttcagtgaaatctttagtgtacatatttgtcacactgtattagaacatattaaggcagctcattaatgttttagtatttagagtttgtcatacagtgagcaaaggcagacacctttgacacagtctattggagcaaaatatgtctaggcttttgcttgcttttttcattttcaaatccatatttccatcagaattttagagttgtttgtttggaggcagagtctcaccctgtagcccaggctggagtacagtggcctgatctcagctcactggaacctccgcctcccaggttcaagtgattctcatgcctcagcctcccaagtagctgggactacaggcatacaccactacgcctggctcatttttgtctttttagtagaaaccattttcaccatgttgaccaggctggtcttgaactcctggcctcaagtgatccacccacctcgacctcccaaagtggtgggattacaggcattagccactgtgcccagcctagggagtttttttgtttttgttttttgagatggagtctcgcactgtcgcctgggctagagtgcatagtgtgatctcggctcctgccgccacacacagatcataatgtgatctgcaacctccgcctcctgggttcacatgattctcctgcctcagcctcctgagtagctgggagtacagcctgctttggcctcccagagtgctgggattactggtatgagccactgtgccctgccttttttttttttctttaatgtttgtattgaggtataatatgcaataaaaggcacatatttaatgtgtacaatttgatgagtttgatatttgtatatgcccatgaaaccatcaccagtcaagataatgaacatgtccatcactcctctaaaactttcctcctgcctctttgcaatttcaccatcttgtttgcctgctgcccccatccctaggcatccactgatctgctgttattatacattagtttgcatttcctaaaattttatataaatggaatcatactatatgtatgacttttgtctgattttttttaatgcagcataattattttcagattcatccatctttttgcatgttttagtagtgactttttgtggttgggtgatatttctttttgtggatataaagggagggttgttgatcttcagggattatttattttcattttaaaagtttctcctgaagtagtattttgtttttgaaaatgtgctttgaaagaaatttgtttagaattcatttggccctaaaatccacgtaattaatgatttaatgagttaaatagtgatttaactatataaatatagtttgctaccatgtttgctatgtgccaggcttgatggtgcttgtagggcacagaagaggttcctgtcctagccagtggttgatgtgttcaggagggcctatcagtagtgcactagtgcaccatatcctacatgtgatagagctgccgtgttcttagacacaaagacagctgttatgctgtctttgcaaaaatgttgaggtcttgctttccacaggcttgtggcctgatgcacgtttccagttttgcacaatgtcacagcagatatgccttccacgcccttggtttttcacagccaggcatggggctggaatctcagagctgcggttgctgtggttctctgattcctgctcagaggattgcgtgatgggggctggagtgcaggcaggaagttagccttgtggattccctcatcctcacaaagccaggcgcacagggaggggttgggggtagggggttgccatgggaatttcttccccagccagagagccagggtggagtgtgttgctggggagttggaaatgtaccctcttttccatatccattgttcagtcacgttctcctgaaagaagtcttcttactgtgtgtaagaaaaatcagtaagcctctgataaatagtcaaagactgtcagaaaagggaccttggaaatatctggtccagcctgcccattttataggtgaggaagctgaggctcagcaagcaggagtgactcaggaataagcactcatagcacagctgggacttgggaaacccaggcactgctttagaccttcattttcacaatccacgaaggggggagtttgaagaaggcttggcaaaatttgatagacctgggaaagagattgttaatctctcattctgtgctcaaggatgctgtgccatttaaaaaacaaaaacaaaaaacagaaaagaaagacaaaataattctcccagatgatgtttctagaatgttctgacatcttacagtgtcctgaccttgcacaagcttgttccagtaataacgttaaaattcaggagtggatgttcggcaacatcattgggcaggattttctggttcgtgaatgaaaggttatgggtgacactgtatgtcagtgtggcgcttaccggtttatgaagggcctacatgtgcaatctctacaggaaccacttcccacatggcccctttataccaatgaggaaatgggcccccggagatgaggcacttgacctgaggtggcccaggtggtaaggagaggagccagctttccaatgcaagtcccaatttccagtctcctgttgtttccaccgtgtctccctgcaaggcggctggggcacgcagaacaacagcttgacacagtgggaagaagctgggctttaatgtttagagttcagagttcagctctgctcccctgcctgctgggtgaccttgtggaatactcctaacctctctgagcttcattgtcatcttttggaagatgaggccctgtcctacaggattaaagtatttaaatatagagtgcttaccataaaacttgcttctaggaagcaactggtcagtgttaactccttaatgaggctgaagtagacatggtaaaactagttgtggaaagagatcctataaagcaaaactgaggacacatttacatataccaaggggtgcccagccctgttcttcctgcacatagaatcttaaatgtttcctagattgagccattaatcttcgattttttgcaaaggaagttaagacagagataccaagtgccttgcacatagtaggcctgtagtaaacacagactggatgatcaactgctctttggaggagcagagagtatgcctacacatcatttgaataaaatgtgacagcctgccagagaccagactttgaaggttatagacccagggcacgtggccagagcagctgtcagtggaggtgcggcctagagcgggtagtgtggaggctggagggggctgttccatggcaccagggttgagtgggagtcagtgcagacttaggagagggaatgtgtgttcggggatggggagcggggagggacttctctcagacacttatatggaatctcaggtcatacagagacattgtctctgtgttttatattttcctttgaggacatctccatttaagtagctgatgcctgagcggggagagaagaatgagccttttccttctgttagagcctgtagctgcctcttcagggtcagactttaaggtgtatggggacaaagttgggtcagtgtttgtagaaaaaaggctctttctccatttctccctcctgcttaatccaaggagcagagaacaccagggaaactcggaagtagcggggttgatttgggagctagatggggcctgacatatgaagctgctacctggttacagccaggcagagttgaaagggtgtcctttggcggggtgagaagagagcagcctccaaagattcccctgcaccccgccaggccctgccaggggcccctcccacagttctttgctccttccacggagcctgtttgagaattcagtgattcacttcccgtcgtcaactcttgtttaacgttcccctccattgttaccaaacaatccaggccccagtgatgtgtggtgttctgagagtagaggagggaagagagagagagagccagaactgtttacagagcccgggagatgggcccaggcttgacagccgggccgacttgaaagacaggctgcagtggactgtggccccaacagctgggtgtgtgcagggtgggaaatgccaggcacagccgctcctccacagaaaccactctgttctttctgctcttgatggaagctcctgccctttattgtggtgttagcttctttgttcagttacaccgacagctgagttttctatttggggccatagttttggggtcatgattcctggagtagaaaaaaaacaacataggagctcactcagaaggatccctgggtaaatgccatcctttcctgggccccagtttcctcacgtgttcagggggaaaagaaggtggtggtgaaatgccccccaccagctccaaagtcctgtggttctgaggctggaatattctgcaaaaggacatttgcacaccacccttccactgcccccgccccagtgtcgtgtccaggtccagttctaccagccacagatgtgagcatgtctggaacctgtctacctgtctcattcattccatgacctctgatttttgaggtcagtaattctgcagcctccctcacctttctggtttaaagcaacctcctctctcaggaagttgtttgaaatcaatttaattcctttatatcccacatgacagctacgactgccactgtttagttgatgttggcgtcgggtttggggcttacttggcttttgtgtttgcttctaacctgcagaaagagtcaaagttctgaagttttctctctcatcctttctgtttgttgctccatgtacagtagggaagaggaatttttgttggtagtccacatttttgattacttatttgctctgctgctatattatgattcaggttttctccaaggccctaggtgcctaaaagcattgaaggaatgagaagtgtagacacagaacacctttaagccacttccccctgcaaattagtgtatttcacaggtatttggaatgctagaaggtactagaaggtgagaagacactagagatccgttgaacccatcattttttaaatgagataatccatacctaaagactcctccatgagtcggtagcacagccagagggagggccacacacacccctgtcatctaatgagcagccagggctccagtccatccccagtgtgggccatatatctgtgtgctttctcctctattaaatccaacacttgataaaaatctccagttaacaaatatttgttgagcaagtttattgcaaatcgctgtatttaatgtctgcctacaaccttagccacagatgactctctctccctggtatggcaagtgggcagagcttcctcattcaaaaacattttagcttcctgcacttccccgctggttgctttcgcctaactggcacctgtggctgtcattcccctgctgtttttaattgcacctctcaagaccagctgattgcttaaagaacatttctggtattgggcccatggcagtaatgtgcgtctgtggatccctttgctatgaggcttgacttcttgatcgggttcacaaggctggtgggcagcctgagatctttgcttatttcctacgtcttctgaaaggtactatgaagcttaccagttgctgatgcacgctatcagctaataattccattaccattactattttctgagcaaatgtgacctgcaagcccctcgctccatccaggatgcaggcaaagttaagctaggtttcctttccctcaaggagctcctggcacagttgggaagggaagtcagaaacacacagaagtcacttcatcataccaggcctttggtgctaaatgatgatgaatttgaagagtgtgggacagtggggatggtggactgtaagagttcgaggaggggaggatggagagaggtcattcttagcagagagccacagagtgggttactgtttgagctggaagataattggacctccaagggctctgtccccacctgcacctcagcgcactatgctggtggccaagagtgcaggagcctcacattcagatactgtggctgcaacattttacctccactacttgggcctgttcagcattttgagtttctatgcctgtaaattaggcctgtctaggaagtgggggtgaggtggtgggtgggcaggtgctctgaatctcagctgggactgggtgggctgataccggggagagttgtaagtatctaggacccagcgggaggacgcctcacctggaagcctttgcttgttcctgattgtagctgttttagggatgcagctttcagacaagggccacttagttgatgaggccggcttaatcgaggagggctgttgccaccctgacattgttaagtgtgggcctggcttctctgaagtcctcctttcttgcttgtgtggaattcctgttttcctgcccataggggttctttgctgtcttaggtgaattgccccaatgaaccagaacctttttttttttaggtacaataggaggtctgtacccttagacagaaaggaatgctaattggccacttaactgtcctcagggtacagatgccagaatatacagggcacccattctttgttaccatttgggatggaaactgcttatataagcttgtaaagctttggttcagaaagcaagagaatgtgtatggaacgttagcaattgctgtcatgcaaatgctgcattttttgcatgtaaaggtacctctttacctccatggtccttaaactaactttttcaagaaacatggtcatttcccacccttcctttacttccagctccccattcatacccaacagtggctaactgaaaggtttgcaaatcctgaaggctttggggcttcttttaaaaagaagagactgagttgtaaatgtcataagactgagatggttgtaaatgtcccaaccatactgtgtgacatttgctaggaattgttgtaaaatcactggagtgagcgcttgtcctgaggcactgcctctccgcgtgaatgtcactgagtcgcccggttgacccgttgcatgttatgcagcacttgtgacattgttttatctctctagccggtgactcataattaaggaagtcaaaactgtgcaattaacacaaaacctcctcatttgccctcttcacctctccccaacccccgcccccagtcaggaatgcccgcctgacattttctctaagtctttggaaactttaagatttgttttgatagaacaaggccgccagttatcatcgcctggttccacttgttttaccccaaaagtctgtgagaatcttttccaggaaaaaaaagaaagaaagaaagaaagtaaatcccacccccaagcgtgcagtctgcccacaggaagtgattcatggtgctccgattcgggcagacctgactgcaggaggcgggaggctgggaaccaggtctgggaaaagagggcagagagaggatacccagacctaatggcttctgctctgtggaagaaagtgaaaaacagaatgactaagagtcctgtaataagaattgtttgttttgtgaagttgaactaatagtgaggtttgccggcagataagacttgagaaattgcagttgtcaggggaggggacttttccatgtcctgctttttttttttttttttttttattaagagagcaaagctatttctcagtcttttttttttttttttttttttttttgagatggagtctctctctgtcgcccaggctagagtgcagtggcacaatctcggctcactgcaacctccacctcccaggttcaagtgattctcttgcctcagcctccccagtagctgggattacaggtgcccaccaccatgcctggctaatttttttgtatttttagtagagacggggtttcaccatgttggccaggttggtcttggaactcctgacctcaggtgatctgcccaccttggctacccagagtgctgggattacagacgtgagccaccacgccaggccttatatctcagtcttaagacattcatatattagtggaaggcccagatttgtgtttcagttctaccttgccacctctaagcctgttttcttttctttggagaagagggtctaagatgagaccattatctcacagtctccaatagctctttctccccattttcccttttatttatttatttatttatttattttgagacggagtctctctctgttgcccaggctggagtgcagtggcacaatctcggctcactgcaacctccacctcctgggttcaagcgattctcctgcctcagcctcctgagtagctgggactacaggcttgcgccaccatgcccggctaatttttgtatttttagtagagacagggtttcactatgttggccaggctggtctcgaactcctgaccttgtaatccacccacctcagcctcgcaaagtgctgggattacaagcatgagccattgcacccaggctattttccctttttcctttccctctaaagttagagtttttgaaaaatatttgatttttttaaattgacaaataattgtccatattcatgggatacatagtgatgttttgatacatattaatgtcattatggtgatcacatcaggttaattagcatctccatcctgtcaagcatttatcatttctttgggttggaagcattcaatatcctccttctatttgaaactatgtaatatatgaatgttactatgtatgttactatataagcattcaatattctcctatttgaaactatgtaatatatgattatacatagtaacaatcatatattacataataattgtaaactatgtaataataatattgtaatatatgattgctagatatttgaagctatataatatattattgttaagtataatcatcctacagtggtttaggacactagaactgatttttcctctttagctgtaattttgagacctttaacaaatttctccccatccctctgttccctttacacttttcagcctctagtatcttctattctgtttttacaaagttagagttttggggctgataaatgtttttacctaaatactcatttttgtttccaccaaatggaacatcatgttgtcgtagaatgaaggaatcctttctgtcctatgggttattttcttctccctcaaactgacaatgcaaattaatttgattccccaaagtagtttggaaacagagaagactctaagtgttggctacatgaacaggcctgctgccgagcgagaggcccagatcacccagaatgagaagatgggtctaaacacacctggctttgtgacttactccatttcaagcttcctgtattgttggaggtcagcttttgggggtgagggattttaatgaaagctgaggtgaagtccactgttgccttaagcccatcagaacgttgccaagggctgtgagtatgctgaatgggtccatgagtgatctcttaaaaaaacataaaccattgtcaggcctaattttcagcagagtgaaatggccacccagaagattctgtgaagcctggcaacttttccctttcttccagtagtcacagaccaacccagatctttgtagcatcttttatttgtgacttgaaagttctatgatcctgctgacactcaagaaaaagcaatccccatcaacttggtgcttggagaaaaaagtttgtgaagaccaaagctattaaatagaaaagccctaaacactctcctcctcctcctccttcaatatttaaccgtcttctttgcatgggggaagggaggggctctcaccacagccaaaagagaatctctgctgatttaaacccagtgtgctttgtagtcatagagaactgagtttggagtgtaacatctaggttcaagcccaggcactgttccttgctgggtgactttgggcaagtcactcagcatcaaaaatttttcatctgtaaaatgggagtgatgagatactcagcctgcaggatccctttatccagtgagttactgagtgagaagtgctgggtaaacgcttgctctgaggtgtaaattgcttctgtttggccaggtgcagtggctcacgcctgtaatccaagcactttgggaggctggggcaggtggatcacctgaggtcaggcgtttgagaccagcctggccaatattgtgaaaccccgtctctactaaacatgcaaaaattagccaggcgtggtggtgcatgcctgtaatcccagctacgcagaaggctgaggcaggagaatcacctgaactggaggttgcagtgagccaagatcactccgctgtactccagcctgggcaacaagagcaaaactccgtcttggggggcgggcgggggggattccttctgttttcccgcatcttgctcatctcagagcatttccttagcccagggggatctcaaggggagggaagagagcagatttgccccccaggggacatttggcaatgtttagaggtattttttttcagttgtcacagctgcaggtgggtcacagctaccggcatccagtgtgagggagccagacatgctgttaagcattctatatctgtctctacacaggacagccccccagccccaacaaagattagcccaaaacatcagtagtgccaacgttgagaaactctgggcctcgccaaatccatagcctgatgttgaaaagttcttggtgtctgcgtgctttacagataattatcatcaggctgaactttctccagtaaccaaccttcttcttttccagaaagtacaaattctgtgcccacccatggcccttgggaggtgggatagcccaaggtctaggcgatctttgtgtgtttccagtggagtccagccctcccaaggataaggcaaggtgtttcttggcttccccctccaaggatctgcccaggagccttctgcaacctctgtggctcctgcccaggttgccccatctgcctggggcacttgtcatggacctgagccggctgctctggagaactagcagagggaaagagaggactaaatataatgggaagaagtgaagaagaggccagctgctggtctggaggatggcatagggggctgcagcctggcattttatttggtttccccctagactggcagcattcatgcccaaagcactagatattgtccatttataagttcagatgaaaattgagttgttcttggtggaaatgttttagtgactggtatcaagggttatgaaatcctgttttcagctcttcatgtccaatctaaactggaacattcaaaaacatgcttagcacacttacagaacttgttgagaacactcaggaaactcagctacaggcagagcacatggtcactgtggtagaacttgcagtgagacctcaattatctagaacctggccaaccacatacttgacctcactagatgtctttgtggcaccaaatgaaaagaacaggctaatgttggaaatggagtttaaataaacaacaacagttttaaaaatctttgaaaatgccagggtgtagtatattcagtgtacatcctgagttctgtttgtaactctttgattccaagcttcagaaaattacaattataggctaattttttatactactactaatcgtaatataatcaaattatatgtctttcaaccagagtcaacaactgctcagtccctttttttaaaaaaaaattaaaaacacttgtcatcttaaagaccttcagacaacttaagattcaatacaacaaagaaaaaattgtcttgctgttcttaacctaccaaagcaggcaagtagacgcacatgtgttttacacacgtcattggaagaaggctggcaataccagcttggttgcaaggaaagaggcaattgtgaggactccttctcacactgcagtaatttgctgagtgaccttgaacaaggatcttaatgcatcagagtctgtttcctcaaccccaaaatgaagggattggaccagatgccctcaaggttcctcaagggtcagctgtcacagttctccaaagtgagttttcaggcagacatagagttagccagtgtcgcctcaccaggacattttgttttctgaacattgggcctctgtggtttgtcacatacacccaggggactgggctcataactccctgaagaacctctgcccagaacaaaggatgctttggatttgactgtgtgtaccaaagggaataagtgaacccccaaatcaaacatccctcttggcagatggtgttttcagggctttcttatttgttcctttattaagcagttgtcctggggcggtccattgcatggaagaaataaaggcatgttctaatacttgcgtattaaagagcagcagaaagagagctctcagggtgagcttatagttcaaaggccaaatggaaccgatgcaaggagactttcaagccacaagcagaatttttttctgccttcccagaaggtccgatggaatgagcacttcacccaaacttgaagtcactcaagtcttgcttttattttgaaccagaaaaaaagaaaaggaaaacccacgtagaatgcaaaatttaagtaaagatttttgggccagtcgcggtggctcacgcctgtaatcccagcactttgggaggctgagttgggttgatcacaggtcaggagttcaagaccagcctggccaacacggtgaaaccccatctctactaaaaatacaaaaatttagccgggtgtggtggtgcgcacctataatcccagctactcaggaggctgaggcaggagaatcgcttgaacccgggggcagaggttgcagtgagccaagatcgtgccattgcactccagcttgggtgacaagagcgaaactccatctcaaaaaaaaaaaaaatgtaattgcaggtgagtgaacacggggatagtagggtagcttgattgctgttcaaagggaaagagatggggaggatatgaaactctgagggcagatgggcatatatctgctgcagcatgtatgttctgggaacatgtgtgtatgtaccagtgtgggttcagggcattcattggcaaccccaagatctaaaacagctcctttttgtccattaaacatagcagatgggaaatgtaaagatacagaataaatggaggtgaaatgtatgccgtaggtttggtttttgagttattaatgtgctacttggggctacttcaaaaaatgaatattagaggagtatttgggggtaagttcacattttatgcaaattgactctaaggcctctaggtaggttgtccttctgaaatggttaagtcttatccagcttcaagatctgggcataggggtatgccccatttagaattagggaaaagaatctgagtcatgcagcctagcttcactttatattaactctgggaaaagttaggaaagttgggtaacctctcaggtgctctgtttctcaatccatgtatggagataatgatacctgcaagttaattgggaaaactggtggtggagtcagtgcatcagtcagctagtgttgcgtaacaaagcactctaaaaacccagcagcttaaatccattgtttatgctcactcatgcttctgtggtggcttacctgggcttggttccttgctacagatttggtttaggtctgctccacatgttttcatttctgggcccagcctatggggcagtagctgcctgggggtgggcgggtgggagagggaagtcccatgatgatggcagaggtacgagaggacaggcagagacatacaatggcagtctgtcccttctgctcacattccactggccaatgcaagtcaatagtctaccccaaagtcacgggacaagaaaatacatgccactcatggtaggaggagtggcagagccacagagcaaaaagtgtggctgcagagaggggtgactaattcactctgtcacagtcatcaagtggccaacacagtacctggcacatagcagcagtcacttccacctctgttgttactattactactcaatgggcaagttgaaaaagaaagtttgtctgaaagtgactagaaagttcggtattaagagcatgtgtgtgtattcaataaaataggtttcaactgaagtgtgataatgttaacaaatttactctttgttcacttctatggcccagttaactggcacagttcttgggatatggtaggtattcaataactatgctgtgattgatgaatggtcacttttaataatggtgatgcagcatgggatgacagaaaaagcgctgttcatccaacctgcccctatctcccatgtatcagccctggtctgggtttgaatcctggctctgccatttacaagttatatgaccttgggcaagcctcctgagttctctgagctgggcgagggtcctgggggtgttgccgtttctgcgtgctcacatagcagtcgtgtgcctggcacgtagttcatgctgaatggatcttggcatgtttctggaacttatgtgctgtgctcctcaccttctccccagcctctgtgttgtcccacagatggctgtgagtggctgatcggtggaagtgcagacgtgagtagcacttggcatgaggtgggccccagccccaccctctctccttggggtacactctggcaggcttcaccttcaccatcggctttgggctctgccatggccacatccttggctgtggctctcaccaccattttgggacactttacgggtcccgcttgaagccaatgggaggaaacctaatttcctgccacaggaaattgttctgctagggaagaatatatttaaggattaaaaccttctgtcagaggaacttgagggagttgctagagaaagacctttgggggtctctcatcaggaagccagtgggtgtgggagagatctcagtcataaatggggaggaggcccaacggcaggttcctgagactgtactcctaatgctagcagctggtcttgggctgggaggaagggctgggccagggagaagagtgggtcataaatagaccattttctgcaaccaagcatatttatggtaacatcagctcagaattaagacttatttattggatttacttaatgggcccagtgccctataaggcctgggagagtgtgttctggacacatcagctatattaaatccagcagctgaaactcccaattcactcttattactttggtaaggattgctacatattttgagtggggcagagggagaaagaaagaacaatgccagggctctgggcagcccagactccgaaccaagaggtgttgttgctgatgcgtaagaagtgaatgagatgtcttccctgtcgtgagtttgggaattgcatggcacagagaagcaggggcatggtccagatgacttttagaaaatactgccaagccagactggcggtcgtgtgctcacaagctggagagtgagaggtgcctgtctccttgctatcagaacccagcctggcagccaggagtcctggccacttggcatggccctgatacagactgctgtgtgatcctgcgacatgcactttgcctctccaaggtatgggtgtatggtgaggtgggaccattgtaagatgtgccttattatccacacggcattgtggtgagaatgatctgagataaggaacacagaagccttgtgaacattcaaagcaccagacagacatgaggactcactgtgaccctcctgactgtgcacccagatggccaaggcagggaaagagatgtgttgttgaggacctaccgtgttccttactttgccggccactatcatagtaagcaggcagtaatagttacatgacaatactgacaatagattcctgccactttctggaatatctttctgggtagtgtctgttcaaatcatatatctctttttttaaaaaaattggattgttaatactgagtgttcttactaatatttcattaaaaaaatttttttaatccctctgggggaaaagaatttttttttttttgagacagattctcactctgtcacccaggctggagtgctctggtgcaatcacagctcactgcagcctcaacctgctgggttcaagcaatcctcccatctcagcctcccgagttgctgggactataggcatgggtcaccacgcccagctaatttttatattttttgtagagatggggtttcaccatgttggccaggctggtcttgaattcctgggatcaagtgatccacctgccttggcttctcaaaatgctgggattacaagtgtgagccaccacgtccagtcagtgttttagatgaaaaatattaagaccaagacactaagtgatttttttcaactttgtacagttagcaagtactgaaccattatttaaactgaggcttattaagtccattgcctttttttggaatggtggtataatttataaataataagccttgcatatttaaagtgtgcagtatgacaaatgatgatatatgtatatacctatgaaaccaccatagcagtaagagaatatacataacctttactcccaaaaaagtttccaagtgcaccttggtaattgctccctccaatccctactccctccctgtaactccctctgtccccaggcaatgactgatccctgctttctgtcactagattaagattagtgtgccttttactttagtttaaattaccttataattttacacgaacagaatcatgcctggcttctttcacgcagcatcattaatttagattcattcatagcgttgcatgtatcagtagttgatccttttttgttactgagttgtatttctttgtatggatatgttatggctcattcatctgttaatacatgtggagtagttttcaatttggggctattacattcatgcacaagtctttggacataggcttttatttctcttgggtaaatactttgaagtggaatggtggatcatatggtaggcttatggttttttagctttttaagaaacttccaaatgtttgagggatgaatatcccaattacccagatttgatcattacacattgtatgcttgtatcaaaatatcgcaagtaccctataaatatgtatagctactgtgtatcccccaaaataaaatattttagaaaggaacttccaagctgttttccaaaatagttgtaccattttacatttgcaccagcagtggaagggagttccagttgttccacatccttgccaatacatggcatgatcaggctttttaattgtagccattctaataagtatgtagtcctatctcattgtagttttaatttgtgcttctctaatgatcaacattgtcaagcatcttttcatatgcttgttgtcttcatatctttctgggtagtgtctgttcaaatcatgtatctcttttttaaaagattgaattgttggctgggcgcagtggctcacgcctgtaatcccagtactttgggaggccgaggcaggcggatcacgaggtcaggagttcgagaccatcctggttaacacatgaaaccccgtctctactaaaaatacgaaaaattagccgggcgcggtgccaggcgcctgtagtcccagttgctcgggaggctgaggcaggagaatggcgtgaccccaggaggtggagcttgcagtaagccaaggttgtgccactgcactccagcctgggcgacagagcgagactccatctcaaaaaaaaaaaaaaaaaaaaaaaaaaaagaagattgaattgttaatattgagttttcagagttctagaaacaggtctattatcaaatatacgctttgcaaatattttctcttagttagtgcttgcctttttattcctttaacagtgtctttcaaagaccagaggcttaaatcttgatgcggtctgattttttttttattattattaagtgctttttggtgtggtatctgagaaatcattgtctatcccaaaaagtcacaaagattttctcctgttttcttctagacattttagagtttaagtttcacttcagtttgtttttgtatagggttacaatgtgtagtttgaagattatcttttttacatatccagttgttacatcaccatttgttgaagactgtccttgctccactaaattgtctttggacctttgttgaagccagtcgtccatatatatgtaactatttctggactctgttaggttccattgatccgtttgtcagtccttgtgccattaccatactgccttgattattgtagctcccttgtttttaaaagtttaattaatatccaagtgattcatgtatgattaatattactactaaggcaagagggccacccacttctatcacctagatggagcttacctccacagccccattctcccccgctgctggcatgagcttttctccaaggccttctcttgcagaggaggctatgatgtccagctggcccttttttgggagttttgtcaaacaccgaagagcaaatacggccacttccctaatctgtgggcacccagtggctttgcaggagaaggagaacagctgaataattctctattcccactcaccacttcccactctcccttttactcctgttcaacctccagctcaccctacttatccagggctgggtttggggagtatctgctgtgatagagaataataacgctaatttgtgggtgtttatgaagcactttcaaatggaaaccaagcttcaggaggtcggggggcagaataccccattttatagatgagaaaactgagtgtcctaggaagctcatgagctgcccagtgtctcccagctaggagagtagaaccctcctttaccccaggtcttatggctccacatccgccagtcctccttttatacctcagggacgagtcccaggctgtcttctcgatctgcctggtaattactgtttttcagctgtagggcttccttgttctggggccccaagggaggaaggtaattacatccttcaagatgcccttagtcagcagctccaggtcagttcctgtgaccaagcccagctatgacctttgtctgtcctttccccttcccaggccagtggcttggagagtgtgattggatccctctgtttctctctttggttggtgctgttggtggcatctggccagcccttccttcacagagtgcccatgaattctctgtattcaggcaaatgggtgccctcggtcataagaaggcacagagggaaagcttgcaaatgtctcactgccagccctgccagctattagaaaaattatggcactgactggcagggtcctaggatgggcctccttgaagaaaaagcagtcctgcctcttaatagggtacctgtgactcatgagcatccatctcatctgctccccacttctatccctgctacccgcaatctgttggtcacacgtagccagagttccacagggcctgtctctttcacacgtatgcacagcccacttacacatctcagaggctacatactgcttttagaaaacaggagaagcctttatcatggcctttggggccctgcagagtacccctgcctgcctccccggcctcgtctcaagccagctctctctcatgatcccctctccagtccttctggccttcattctgttcttccgacctcaccatgttttccactttccacagggcctttgtgtgtgcctttccctctgcttgtactgcccttctcccgcacccctttgcctggttagttcttacttaccctttaggccttcaggtcaaccatcacctcctctgagatgccctgtccagtccttcagcaaagtggggtgccatggtcatacactcttggggttccttgttattttcgttcaggacactttcattgtgtgtaattgtaggtttctgtgatgatgatgatgatgatgatgatgatgatgatgatgatttgaaacggagtcttgctctgtcgcccaggctggagtgcagtggcacaatcttggctcactgcaacctccccctcccaggttcaagtgattctcctgcctcagcctcctgagtagctgggattacaggcgcccgccaccatgcctggctgatttttgtacttttagtagagacagggtttcaccatgttggccaggctggttttgaactcctggcctcaagcgatccacccgcctcggcctcccaaagtggttttggtgattatttgattaatgccggtcttgcccagtggaatggagggtccctgcagacagggaccactttgctggccttttctcatagtgaagtctctttccttaccactgtatccttagtgtcacacataataggtgctcattaaatatgtgttaaataagggactccattttagtggcacctcctcacctgtctaataccagacactatctgaagttttacgtccctccagaagccttctgcctcccagccttgcctgtagctgacaatgcttttgccgccccaagctccccagtcctttcctgtaagccacccagactctcatcatccagatcacctggggatttcacaaagggaaagattctgatttagtaggttggggtaggcgctgagaatgtacatttttaacaaacttccctgaacctctgctgctggtcagggaccacactttggcctggcttgagaggtaagggcaccgggtcatagctgcttggccaaatcaccatagaagacatggttcacacagggtcatggcactggccaattgtaagtaggcacagtagtgtgcccctgcagtcccagctacttgggaagctgagctgggaggatcacttgagcctgggaggcggaggttgcagtgagccgagatcatgccactgcactccagcctgagtgacagagcaacaccctgtatcaaaagtaaaaaaaaaaaaaaaaaaaaaaaaatccctttaatttccgtctttcactccctgctcaccacaaataactaaaaaagaaaggaggggccaggcacggtggttcacgcctgaaatcccagcactttgggaggctgaggcgggcagatcacgaggttaggagatcgagaccatcctggctcacacagtgaaaccacgtctctactaaaaatacaaaaacaaaattagctgggcgtagtggcgggtgcctgtggtcccagctactcaggaggctgaggcgggagaatggcatgaacccgggaggcagagcttgcagtgagccgagatggcgccactacactccagcctgggcaacagagcgagactccgtctcagaaaaaaaaaaaaaaaaaaaaaaaaaaaaagaggaggaaaggcaagttttctttttttcccctgactttctaatgtgcaagggaagacctgagtgaatgaggggagacagcctttgtactttgtcactcttctttggatcactgtagtcctcatatctgtgcctaaagaactctcattgtcttccccagccctgtcccctctccacacctctgggctgagtaggaagccgatgagtggctcctggaccttttccaagcacaactgaagtgactgaagtgcgggcccttcccatggaatgccactccctgaagagcagtacaaagttggggaacccaccggggactggtgggtgaggcccgctctgccagctgggagtcctcacggggcctttgttgtcttctcctgagatccctcccagcactctcagctagcagtgctctgatctcctggacctctggatctgggagaaatgaggggagagagagctttccaagtgtctgaaagtaggaggccggactctgcagaaagcaagcacaatccacatttccctctctttctgcccctccccgtcctggcaggtccctggatggccggttgcaggtgtcccatcggaaggggctccctcatgtcatctactgccgcctgtggcgatggccagacctgcacagccaccacgagctgcgggccatggagctgtgtgagttcgccttcaatatgaagaaggacgaggtctgcgtgaatccctaccactaccagagagtagagacaccaggtatgctgcctggcctgcctgtggggacagcaggtgccaggggtcatcacctctccccggctccccatccccccgagggtctgcggtgcacttgggggtgcggggactttggtgctggtctggcatcgacactgagccacctctgctctgtctcccccggacagttctacctcctgtgttggtgccacgccacacagagatcccggccgagttccccccactggacgactacagccattccatccccgaaaacactaacttccccgcaggcatcgagccccagagcaatattccaggtaggcacgtgggcggcacaggctggcctgggaggcaggggcagcggtcagccccgacatcagtcctgtggccccaatctctgccccctggccgtcccccgctcaccccctctttgcgcacagctctggcctgagggcccctgactcagaaccgcatccctgttgggagaggacccatgacctcagctcccccctcactagtgatgcttttcttggcatagaggagcagcgtgacccttccgcccggccttggtgcagtcatttattttggaagcggaaatagcaacactgtttctctcaccgcccttgaggcccggactggtgttcagtcccaatagactgggggtctgcagaggcggggagtgagctgagggccaggcagcaagtgcggagagctggctctgtaaattcgcctgggcatcaggcctcggtgaggggctccaacctgggtgggaattgaagtgactttgagttttcactctgcagggagaaatgggctttgccgtcaaagactgcaaatgtttttagaagcccctcatttacatgcaaataacgtgtgaatcaccagcactttcagactccaggaaagctgtgcttggcagcacttgggctagtcacttttgcttgctggggcagtaatcctgctgcgttcctcttagagcattctaatttggacgtgacgttcatcctgggttagtttactgggctgagattggctacaggcctgtgtgcttgggtcagagtgttaaggaggagacccactgtccaaccttctcagatcctttgcgggtagccctggcgtcccgcgggtaagtcaactactccctgttcaaagagcaaatcttggagggcttcagtcagggtctgggggaggtttcagagaaatagatcacactgtctttgccgtcattgaacttgcaacctaactgctgagtgaggacacgtcccttagagacaacaaataataacacctggtctgcacagaagaagatagtagggaccaaagggtgggtctgagcctgcagatcttcagaggacagaaaggggtgaggcggaggcaagtctggacgcctccctggagggggtggggcttaaccctcaccttgaaggaccaggataagttagcctggcagaggctctaggagtacacatttcagacttgggagttgatccggtcctgcgtgagcaaaggcagttatgatccaagcgggagtcagaggtggacaggggcgaggacaacagaaccaagagctggaacctctactccaagacctggagctcctacagccacggatgctagcatcatggtgtgcatgtgtgatgtctttgcaaaaggtgtctcagagccaagctgtgaaggccttttaacagaccaccttccttctgattcccagagaccccaccccctggctacctgagtgaagatggagaaaccagtgaccaccagatgaaccacagcatggacgcaggtcagtcatgcagggtcatgctcttattcttaactgattagcagctggtgggttcatcccttccatcccttcctcttcgccctctccctccctcccttctatctctctctccagtatttgtagagcaaccgcgatgtgcaaggggcagggcatagaagagggtccgagctgctcacagatgatgggggagattgacaggacagtcagtagtcactgggccatctcgtgtatgccctgatggaagatgccgcatggcaccaggcacacagcagggccacttcacccggtctggggaggagcagcaccttgcagtccaggtttttccccaggttgagtcttggtgatgtgtaagtgttagccaagctgttagagtgggcaaggggtgtgccaggcagagtcatgggggttgggcaggacagcctggtgcattctggggacagtaagagctcagtgtgtctggagtccagagagtgtctagcccagggagctcagcgtggctggaggatacactctctccagtggggagaagatgggagggcctgccacacaggggtcccagtgtggtggaccttcaagctagccagaccacttggcatttagtcagggctgatgggaaccgctgcaggctgtaagcagggcctgtgccttagtgagatgtcaccagcagcagggtagagagtggccttgatcacctcaagcagtcacatgggaggcaaggagaggctgaatggaactaatgcctcttctgatgaccagtggagacccctgaagccagtatttttgtgtgacaaccacatgtgatgtgtgtgctcctgccgtgaggggcagggcttatttctctcctgctacatctccagatgtttcccatatcatttgttataggaccaaattggctccagaccagcagcttcttgaattgaaccccagctgccacatagaatgtgtactgagttgtgtgtggttgggagaggaggagaaggggagagggaaccacgcagatgttccattccgatggtggtgggcatgcctcgtacacacagagccgctagacacagcagagccacctgccctcgcacacagcccagaagagattgtgcaattccttcccccacctttcccagacagagtctccctctgttgcccaggctggcgtgtagtagcgcgatctcagcttactgcaacctctgcctcctgggttcaagctattatcctgcctcagcctcccaagtagctgggattacaggcaatgcagcaccacgcccggctcatttgtgtatttttagtagagacagggtttcgccatgttggctaggctggtctcaaactcctgacctcaggtgatctgcccgcttcgacctcccaaagtgctgggattacaccgcacctggctgaggttgtgcaattcctgagagaccgaaagagactcgcatgtacattgtagttgctgaaatccagcctggacatcgtggcacttttgggttgagcacacccggtgaaacacacccacccggcggagtgactagtagcgcgaaccagctggaatgcatcgaagaccttcctgtatctgatgccaagtgaccgctgcaagcttgcagctattcagtgcaggcgtgggaagcaggccagcggagcagcatgtctccagctgctgtgtttcttcccactctgcgctccctcttccctttctgctgctctccatatttgcacaatgattattgttacaaacaaacatggaccagaggggctggagattggaaagagcagcccagatttcaccctgtcagctcttgtttcttctccctcctcttcctccttgtgcctccctttactctgtcccctctcccttcttcctttcttctcattaagtgtgcctgcagggtcctgttgtgaacatgagtgatttatctacagtagagacagaccagacttgcggaccccagccagtgtgtgggtgggggctctcctgttttagtctctgttcttcagagttgcctgcttggatagtccagttgctcacgggcttggcttccctgccccccagggtgtggtagtgtctcgggccagagggtcacgttgttccccatgtcccttcacctacatatgcgcccttttagacttgcgagaaggccccttggacttcctaggtctttgtggttcaggccagcacaaaacaggggacaagcatttatccagtgcctaccatgtagcggtcatggtgtaagcatttttatatgcacagtcttacttaatttttacatgtcacacagtagatgatattatcctcattttatacctgaggaaaaaattaaggctcatagaagttaaacggcttagccaaactcacgtagctgattcgtggggttgtctagaccctgtgactgattctgtaacttagttctctcggtgaatattccacatccccctttgcatttggggttacaggggagaaggagaaatccgtggttcttcccttgccctcaaggaggttacagctgagttggggcaaaagaagagattcccacaaacagcgcaaggcagcattcacttgaggccagatgctggacccagtctcaggactgatagatttcatggggtggaattagaccccatagggtggttaacaaatagtctccttttttatttttattttttgaaacagtctcactgctgcccaggctggtgtgcagtggtgcaaacacagctcgctgcagcctccatctcctaggctcaagtaattgtccagcctcagccttcaccacttacggcttatttttttttttttttttttctgtagagacagggtctccctatatcacccaggctggtctcaaactcctgggctcaagtgatcccccagtctcagcctctcaaagtgctgggattacagatgtgagccattgcacccggcctccgcagccttcttgatagaggaacagaggagcggggacgagcaggatgctgctctggaaaagtgtccactgttttatttttgaaggctgataccatgtgagttctttttttctggaggtgagaggtgtagagaacataatagagtaagaattgggtagattgagactttttcccacgtgcatcatcatcttttgcataaagtgtttgtctggttgctgagttgcagggtttctgaggcaggtttgtgagtttcctgaaattgatctttccagcacctgagctgctgcagcctctgaccaaggtcggtggctggtgatgctggggaggcctcaagccctgcctgtgtgggagggctggcctcctgcttcctgggtctttgcagcttgggagaagggcttccctgctcctctcattttcctgagggcatagttaatagggcaggtggtgtaagctaaagaaaaaatgtgtcacttattctagttgagaatttagcagccctgagctgggagtcttggttaggatcataaaactatctgagacctctgagatcataatcataagagacctctgagatcatccactcaatgcattcattccagacaagaaattggggcccagggagggaaagtagaggcaagggtatgggctaggccttctcctgggacccctcagtccagggttttctttctgctgtgttgggctacccctccttgatatgtaagtgtttagtaacttggctctccaggccaagaatcttttgtgaagtctcacaacttgtctcacctcgcaggttctccaaacctatccccgaatccgatgtccccagcacataataacttgggtgagtatctccttgtgcacacaactggaaccccctctagctgcagccctggcgagtcgccagtgtggggagggggccctgaaggtaaggctctcccccgacccctaccatcagcccagctcagcccatcaggtttctggttacggtgatgttgaggtcaccacggaatggggaaacttgagaacagtggtggcaggaaagacaaccatatgccaggtttgtatttcccctggggggcgggtagacgtgagtgaatgaaaattcccccaaactttatgcccaggagaacgagggtctgtggtcagctaagcatacgtgtgcagtttggtgcaaagccacggacagccatgcagactccagccccctgacatttatagacctgtttcagatatacttatttgagtgtttcatcttataattgtgtaatttttcttaaaatagcaacatatacggaatttgaaaataaagtcaaagtgcccataatcccaccaccctaacataactgtctatgtgtgattacagtcctgatgtttgtgcatcaggcatatatatctctgtgccttgccactgagatcatagtgcatatctggtgttttcattctcttttctccttatgttattttgtaaacacgtttccgtatttaggtgtcttgtttatcgttgtgtgttatctcatgatgttttggagtggagggtccattgtttccgcaacatccctccatggttagactgctgggtcagtttttccaagactcaattttctaacccagtagggtccttcagttctccagcttgggataggctttggcatggaacctgccaaagggcttcaaacaaatgaaatatccatttagtttttattgaggggagatttttatattctggtctggtagttttagaaaatgtaagttggattttgtttggaactttattgctgaggcttaatttgtggctcaggaaaagaaatagttaatatttcttggcgaatcaaagtggattggactggtttttgtgcccatttgcttccagaccttgactgacagcgtcagatgaagaaactcatcatttggaatattaggagatgcttgaaaccctttagaacaggctgacctgggcagtgtgggatgtgactttgggagatctgttttaacatttttgtaaaataatatcaccatgagtgccgggctttgcagagggaaggtcagattcctgatatgaaaggactgagttattaaaaacaaactgaaggctagaagcgaagttaacacttgagaaattaaaggccatgatggtgaacttgactccgggctttcagcttttgagattggctgctttagatttattttctatggcatttaaaaaccctcctggggccaaggtagcacttttagtcaacagccttccaagcagacacttgcctttgaaaccatagcagtcccagggcaggttggaggtggctgatgccggacacggtgctccagactgaaaggtggtcatttgctgtgaacttccctctagattgtgtagactaggatgaggatgatgggatgtttcttgagctctgacccaaggcagcatcctctgttgacataattctccctccctactgccccttcctcgggcagcttgcctgaaagttgagaattcttaggttatttcttccaaagggaggaccctccccgagcctggccagcagagaatgagtgccactttgcactggcctagttgcacctctgctgggaagatgtgaatcgggggcgagtcgcccagtgagtcagggttaggcttctgggtaagacaccgtgctgacaggcctggcttcccctctgcttcatgagcccctgtgctccccttcacccattcaaaccattgacttcatccctacccagaaggtcacctggactcccagtgtcatagctggaagggggtgagatggtgatgatgatgggaaacatttcttgagagtttgctgtttactgttattcggagtgcttcctgcatgttaacctgatctttataactttataaggcagaagcgttgtgatttttcattttacagattaggaaaccggggaacacattggtgaactcatgtgtcccagattcacagctagtgaatggagaaggtggctttgaactcaggccctctcactccagagcgtgcactcccattgtggcatgacactgccttgctgggccgtttagaccacctgtccccaccttcctcacttggaggaacaaggctcagacaaggcatttgctgacttttacgttggagacgtaaaagtctgtggctgtggctcccggggggaagccctgcctgcttgtatgcctcttcctcactccctcattcccagatacttcttgtctgcctgccgttcaggtgggggattggaagagggaccacagacatagccatcgaggggctacggccttgttgggatcaataaggcaggaccaaaaatgattctaaaacaagaaggaggtgcagatgaagtactctgagggttcgagggatggagcgatgggattccaggctggccaggcgtctcctctgtatccatgcgctcagtcaacattggctgagttcccactatgtactgatgctgggggccagagctgggagagcactacacatttgcagcctgggggcggggaggggggcagctggaggtgtccatgtccacctgtaatgcgttgtgccaggtgcccagggagaaagtccagaagagggaggaatagtatatgccaaggaggaaagtgtggatggagtggggagacatgggagaggttgtgccatgtgtgagcgggcccttgaaggacagatgggaccctgtgaggcagagaaggatggaaggacattgcaggtccaagggcattatgtggtctgaggacagctggcatggtggttggttgttgtctcaagagggacaaggtgggaaaaggaggctgaaatggcaggtggggcactgggaaaagacccctgagtgtctgcttagcgccctcttgcctatagaataaagttgtttgtgggttttgattggggaggttttctgatgacagcttcataaagattaatctggccactgtgtggaatctaaattctaggggaaattactggaggcaaaacaaaacaaaacaaaacaaaaacccacttagacagctcttcctctggaggaggctgagataaatgctttcgagaaatggtagcagagctgggagaatgcatttgagagggaatcatgggcctgaatgagcagggtttgttgaccagcgttaagtgggatgatggtgatgcccccatcgaggctggacacccaggaagtggaatgggttgggggtgaaagatggtggtgggttgcctgtgcttaactatgtccaggaagcagttggaaagtcaggaaagcggctggcgctggaggcgcagatttggaaaccatgaacacatgtggcagcctttcccatagcggggcctgagagaaggggtttggtggttgaatgagtgtggaaagcctgtattgtggcctctcctccagcccccactcaggagggactcacatggccacgctctgaggagcctgcagaaggaggcctgtctgacccagccttcctcccatgcactgatcactgttcctgtacttctgtcttaccgccccattacccatccatagatctgactctggaaacaccgatgaagtttggctgaagtcatgccagtggatggatttagtggagaggccgacccagctcaagatggaaagacagccagagatgcgctcgggcggtgggggttccttggagaaggctgaggtcagggggatgatggggtcacagcagctcagaggggaggcaagccctgaaggacagtggctacaagcgggccctgcagagatgcaaaatgagatttaagaagaggccttggatttggcatcaggggttcaagggggagcttttagggagcagtgtgtaggaggggaggggctgcagtcagtcagcagtgcactgaagggcaagtaccaggtggggaggtggaggcacccagcagcgcagcctttgtgctgactcacagtcagtgcgtcccaaaccctaggatggaggcaagcacacagggagctcttcctaggaaaaaatggggacatctcaggacatctgattatttcctttaaagagattattatgaaattactgtacaaaaagaaataaagcagaggacatctggtttctcctttcatttcctccccactccaggtgttagccccagggctcaggtctggggaaggttgagcctccttgccccagcaaagccacttctggtaaggggcagggactcctggttgagacctggctcagcatcttgccccaggcaggctctcggagaccctgggacctgggaccgttgtttgcagggcaggagatatgagcaggtgatgttcctgttattacacagcgtgctgggtgagtcaccgggaatttcctaggcatttaaggcggaaggattggggtaaatggaggggaaggaggaggcaggtggagagaggaaaaaggtagtgagctggcttctgcctggtgagtaagttgttccctgctttaaagtgagatgattagggcggagccatgactgaggaaaataatgtaccagggagagccctgagggagcagttgagctggagttaaaggaggtgatggcttccagagtgccagtggcaggagtgagaggcagggatggggcagcttggagtgagagggatagggcagcttggaggtggctgatgccggatgcagtgcttcagactgaaaggtggtcgtttgctgtgaattgccctctagattgtgtagactaggatgatgggatgtttcttgagcttggacccaaggcagcatctcctgttgacatagttctccctccctactgacgcttcctcaggcaccttgcctgagagttgagaattcttaggttatttcttccaaagggaggaccctccccccagggtgccactttgcactggcctagttgcacctctgctgggaaggtgtgaatcgggggcaagttgccccgtgagtcagggttaggattctgggtgagactccacgctgacaggcccggcttcccctctgcttcatgagcccctgtgcccatgtgtgagcacaggtgtggtggcagggcggcccgaagaccaccagccctgagtgtggacggcggcccagggcagaggcccaacccagttccaggcatcttcatgctgctgcccaaggctcttttacaatgcagcctctggctccggtcttccccacacttgtgaaatcacaggcagggtcttccccacacttgtgaaatcacaggcaggcaacataatgacaggaagtcagctgtcggctctgtcttcatactcctgagggcccggtttttagactttgccactgttcctggttgcagtatgctggtcataagctaaaagggcatgggggtctctgtgcagcttggtttggtattttagtccgcagatacataggttggaattagtaccctgggtgctgggacacagctggcgtgggctcacagagacctcatcctctagcataggagactcaggtacacagtttctgggacacaaggttaattctgcactgaggcagtgagggagtgtttcacagccgtgtgagctgggccttaaagatcgagtccctgcagaggagggggatgggcagtccaggcagaggacccaggcaggactgagaagtggtggatgaggaacatgggaactggagtgtggaatctcctagattgaggaagagctgccttccgcaggtgaggtgggcccagcagaaaccagcccatttctgttttgacctttcgtcttgcagcagcagtgctcctggcctttgcccgttccttgctttcgatttataggagaaagttaatttccccccttgcctccccacctcttcctttacgggatttgaatctcttgcacatgtttttaataggcatcccttaatccaagtgttgccttctgggttttattctgttttctttttcttaaacataatggaacgtctgtgccagcttggaacaggactgaaaactgaggccagccaatgcgttaggctggcagggggccagccatggattaagtgccctatggcacttgagaagtctggccgacaccacactggtgggggagggggatccacaaaggctggagctggaggttcctgcgtctccaacacctctgcactgggaggagagattagcacagactcagaaatctggccaggagcagggctgtttgaagggaaggccgtgggcacgtgccatcgtctaccaccccagctgtgcaaaatgctcagcctagaggtgaaactgctcttcaatggggtgtgtcaccttaccccccgtagtcattctcctagaggagccttctatagaactgcttctgcatttgttggtaaatccttgaaaccagatcttaatttgcttgcttgcttgatcagttgattgattggtcaggggaggggttgccacctccccctgagagatttcttttaagatttaatgccaggacaaactttgttttccctgaggaactagtaagcattgcccatccaccaaccagagccatagaccatgtcatgttccctttttgtcttgtctactaggaagctcagagccaaactggatgcttttgcagtaactataacctcatggttatcccatttatagccgccttctttccagagtcctttttgtttctctggtactaaccagggtaaggataagtactttgggaaagaaatgagggcatatttagtgttttgggtttttttttttttttttttttttttggtgtgtggcagagtcttgctctatcccccaggctggagtgcagtggcgtgatcttggctcactgcaacctctgcctcctgggttcaagtgattctcctgcctcagcctccagagtagctgggattacaggcacccgtcaccacacccagctaatttttgtatttttagtagagacggggtttcgccaggttggccaggctggtctcgaaatcctgacctcaagtgatctgcctgccttggcctcccaaagtgcttgggattacaggtatgaaccactgcatatggtctgtttttttgtttttttttttgttaaggaaaaatgtgccattgaaggcagaacccacaggtggtgaccatactttctggtctgccactcctcttgcacaagttctgggaggaagcagctgaggcatggtgggcgggagggacctagaaaggagggaaatcacggctggcttttagttgtttgcagagaatagaaagcgcatggctggggtgctgctctggctcagtcccgcttctgaacacagggcagcttgtccaaacagcactctctgaaatggcagcctgcagactttgccactggcctgatttcactgctccctcaaacaagcatcttcttaatgatgtgtcaggttcctagtgtccggggttttccacaacactgtccggtgtgtgtctgtgagttgcagggctgtttggataagggctcagatctgcttgggagggcctctcggcctatgaccccaggcctgtctttgattctgagggtccttgaagcccacccttccccagagcatggttctagcaccatgcgacacaatgggtggcctgccagctttttctttttttgaatggtgggctgggttgccgttcctgggagcctagctctttctcttctgcctggactaaacccagagaatgctgggcagggctttatgattttggggtgaggaccctgttctgttctacacattgctgagtaagtcagggccagtcaaagctatatgttcaagctgacccgtgccagagaatgatctaggtggtcagctttattgtagctttattgtcttctagtgtaccacagtgattgtacggactacaaaactgaggttacagaaggaggtcatgtccccaaggtcacacagcaggatcagcagagcctgcgcttgggcagtggtggccagcagcactgatacattgcttgaccactctgaatgcttgggttgcacttggatttttttttttttaagtttccaaagcaacatagctcacattttagtgaccacattgtttagaatatagcttatctcattggaatgttgaagcatcaagcaaagccagagccagacgtggctgacgtggctcagcctcacctcaggggccagggcacaagccgcagctgctcctggccctgtcattcctcccttccccattaagtacttttgatgccttcatccttatcttcctttgctccaccccaggaagagagaaaacgacaagaatgctttgcctctccatcttgatggtgatcaagataggaccaggctattttcaagttcacagaatcgggctattatcattgttgttaacaccatgtgctgagtgtttgatgcgcgccctgcacctcacatgagttatctctgtctgtccagaaacagcgccgagagtaaagaggatgaggcccacagagtgtagctggtttgctcgcagttgcatgtctagtctgtgcctgagccaagattgacctccagtctgtctggaggatggctttatagcttgtgccccatgatccagttaaatatctagggcaatggttttcaactggaggccgttttgccccctagaagacatctggcaatatccgcagcctttttttattgccacaacttgagagggtgttatggatgtatactactagcacctagtgggtaggggccaggatgctgctaaacatcctgcaatctgcagatcctccctcccacccatccacccacccaacaaagaattatctggccccagatgtcagtagtgctgaagttgaaaaacctgacctagggtgtcctaatcctccagctgacacttcctgggtgtgtgtggagtgcaggggtgttactggcctgccccttcaccattcgtgatagtgttctccttgctcttagaaaggatcatgcacctagactccaaaaggggattgggacactctgtcctgcaggggcaaccagaccccttccagtgggcagaacagcttctgacttttctctcttgggctttacacaccttcagaaggtctgatgagcagggatcctcccagtgggttccccctcctagacgttgcctggcatccagtgagcagggttctcaggccagggctgagacgtgggcatggggagcgtctcctgttcctccctcaggaggaaccctcagccccatgctgagggttaaagcgagggaggagagatgtcagcctgggccctgggacctcatggtcaagttggacagtcaggatgctcacagagaggcacacccttagtaactgcgtcgcttcgggtatatttaagagccagagggacttcagaggcaggctgaagctttgagatggaagagcgagaatgagcaggggactccctaattcttcagcagatggatggaattcaggtaggcatcaagcagagtgtcgtaggctaagggctcgcgcccagcagtcagtgcagtgcagagaagcagttggaagaggttggcccagggcgcagggcagtcctggtccagaggctgtggcatcggtgtgagtgggaattccgagggcccggccaagggctgagagaatgggcctggagatgctgcagaggcgtgcagtaggagggcacagtgccagggccactgggccggggcaagaggagggcgaggaggccccaggaaatggaaggctgggatccatttctagtgtgaggagaagctgccatttactcttctgagaaagagaaccagccccttgtagaatggcagttttgctttgaggagcccctaatggagactgtacagacaactgggacaaatacagattttctttcagaagggtttgtgtccgagccaccccaacagccggcatctagataagtgtggaaaatagtttctgtgataggaggcatggccccaggctcagtctgcagatgatgcctggtgtgtccactgcgccaacatggggcgctgttgggaacccactcggctgctgcaggcttggaagctgctgctccacaggctgggagtttttgcccccaaggctgtgcagagccaaaatctgaaagcccttttaggggcagggattaatgtgggttactctggggaccttgcaacagaggctgagaggtgactgtgcaggaggtgtggcctgccccacagtgagtacacgcagtggctgtcccaggttcatccaggtactgggtggcccctggtcctcttcaggtttggcccagcccctccttgaagactccttccatccagtcaaggccaagcaggcggggcagggcctttatgagctaaataaataaataaataaataaataaataaataaaaagagaaatcaatggccctttacacacaaggctgatggaatctcctccagacacctgagcatcttgttctggtggctcttgccagttttatacgataaaaggcatggggtagggagattataatccctctgaaatgcggggaaatggttttccagagtgtccatgggaccccatcgagggagcatggggcttgggacacccaatgacccagtagcccaccctgtgtccacagacctgcagccagttacctactgcgagccggccttctggtgctccatctcctactacgagctgaaccagcgcgtcggggagacattccacgcctcgcagccatccatgactgtggatggcttcaccgacccctccaattcggagcgcttctgcctagggctgctctccaatgtcaacaggaatgcagcagtggagctgacacggagacacatcggtatggggtggctccattccccgcccccccaccctgcccctgccactctatcccacccccagccccaggcctgaacacacagcctctgaagggaaccttgcgtccatccttagctgtgctctgcctcctgctgggcatgggggaagactcactgccccagcaagtcccctacactctctgttgccctgtttaggggccagacaggtagtgttcaggccacttgatcattcccactcaaagatataatctcagaaaatctggaagccacagaggaaaatagttcatctaagggatcaagaagggaacgtctatgagaaaggcaacatatgaaatctattttttttttttttttggagacagagtcttgctttatccaggctggagtgcaatggcacaatcttgcctcactgcaacctctgcctcctgggttcaagcgattctcctgcctcagcttcccaagtagctgggattacaggcacccaaccaccacgcccagctaatttttgtgtttttagtagagacggggtttctccatgttggccaggctggtctcgaactcctgacctcaggtgatccacctgccttggcctcccaaagtgctgggattacaggcgtgagccaccgtgcctggctgaaatcctctaaataaaaatactctgaaagtacagatggataggttgataagtaggcagtcattgttggaagagtgatcttctcttattttcatgtatcattattctaaacaatttagaaaaggtagaaaagaattgtccactatccaaacaccactactgtgaaccttctgccttctagcccccagaacataagtaaaagatgactttgtgagtttaaggaagatgaagctgtgttacgcatcacttggtttgcttatgaagttatcaagcttagaggattttacgatccagaatcacaactgtcagaacttagaagggctgtagagagatggcagagtgaggttttctcagaccttgtcctggagccccaagggttggcaaagggttcctgcggcaaactcaggaggtgggcaggttagcaaagggaagcctggtcccacgtgaaccagggcacctctgcactcgcttgctttatatctcgggctctcacagaagacttcatttgaagagaggattgattctgtagtgaagagaagaaaagtttggaggccatgggcctaggtctgtgctctcattttctaggaaagggacctgatgtctagggggttggggagggtagggaacggctctgcagagacctcattgtcagtgacagacagccaccactaccagacctgttgttcccatttcgctttttgttttttacttcaaaaaagatacttattctgggtggcataccactgtttgattgattgattgatttagagatagggtcttgctatgttgcccaggcccagtcgcaaactcttgggctcaagctatcctcccatctcagcctcctgattagctgggacaataggcatataccactgcaactggcttttttctatattttattaaaaaaaaaaaaaaatatatatatatatatatatatatatatatattttttttttttttttttttggagcggggagaccaagtctcgctcttgtctcccaggctggagtgcgatggcacaatcttggctcactgcaacctccacctcccaggttcaagtgattctcctgcttcagcctcctgagtagctgggattacaggcatgtgccaccacacctggctaattttttgtatttttagtagatatggggattcaccacgttggccaggctagtctcgaactcctgacctcaggtgatctgcccgcctcagcctcccaaggtactgggattacaggtgtgagccaccatgcccggcctatttttttaagttactgaaacgaaacaaacatttttggtctgggtcttcgcatccccacctctgccttctgctcttactgacaatgatacagttgtggacagccaggaagtcatccctcctgtggactctgagccaccagcaccctgcagaactaaagccagaaaaaatggggagtggttggaggaaggggacagtagtgggaataggaggcaggacaggggacatccagtgatgcatgggtcggtcacctcgtgttcatcctaccggatgctgggcctgtaatatctggctccgtgttctgacctctgagcttcttccccaggaatggagcagagactttgccatgcaggagaagggaccatcccctggccgagcaaagagctcattgtcagagtttacgcaactgtttgagttgcagagccaatttaaaaataatttctgtccatctggagtggatttaagagatgaaagaaaagtaaatgatataaacctctggaatgttttagaaaaatgcattgagggaagaaaaaaataagggcatagcgttaaaccatccctgcaataaagggctccttggggtgtctgctgcatcagaaggagccctgcaggtttactgaatgaatctctgaatcttggagtgtgaagagaccaaataatagtggggtagtagtagcagtagcagcaagaaaagctgacaccaggcacttactgtgtgtctcacagtaatcctgcaagggtagaggttatcatcattccctttttttttttttttttggagttagggtctcactctgtctcccaggctggagtgcagtggtgtgatgggagctcacggcagtcttgaacccctgggctcaagcaatccactcacctcagcctcccaagcagctaggactacaaggatatgccactatgcccagttaattaaaaaaaaaatgtttttgtagagatgaagtctcattacattgcccaggctggccttgaactcctggcctcaagtgatcctcccaccttgccctcctaaagctctgggattattggtgtgagccaccgcgcctggcccccatccctatcgtagagacaaacgaagactcagagggtgaataacttgactgaggcccatgcctactcagtggcaaaggctgtcactgagacctatcctgtgtgcccatctcttgtcatctgcctcccttggctttaggaatccggcagtgcccatttcccctactttaggcttgggctttggggcccgtttgcctggggaagctggcagtcactgggagcagctctgctgttctgcctcctttgcgagcctcaggtggccccagggccattgtgtgtgagcaaaggcaccctgtccagtctaacctgaatctctgtaggaagaggcgtgcggctctactacatcggaggggaggtcttcgcagagtgcctcagtgacagcgctatttttgtccagtctcccaactgtaaccagcgctatggctggcacccggccaccgtctgcaagatcccaccaggtaaacgagccgcacaggcacccctgccttgaggtccctctccgagtgcatgcctaggatgctggagagagtccacctttctcaccttttctgctcactcatgattgcgttgtcaatctggaggtgattggattaggttttctctatgcccacagatctaactgtgctttccctgaacttccagggagcagatgtagcatctgataggtctgcctttaacctgtgggtacctgcctgttgccctgtgcgtagatgctcaggcagtatggcttcctttcttcactcattcattgcacaaacagcatgcagggctctgtgccaggtgctgtaggggatgaagaggtagatgcggccctgctctgcccccgcagaccttacaggcctgcagagcacagaagacaaagacacggatgagttcaatataagggacgggtgccaagcaccaagccagcagcccaggtagagagaaggcccatttagctgttgggatggatcagggaagtcttcatggaggagaaacatccggatcctgaaggataggtaggcactaggcacagggagggcattctagacagggggagcagcccaggcaaagggcctgaggtaatggagggcaggacatggatgggtagctctctggctggaggagggtcatgtatgagaccgtcaggggaaatgtttcaaaagcacaacagcatgaggccgtggaaggacaccagagagtttgactctagggaactgctgagggttttctgagtgagcctgaaaaatcccacctgtaccccaagaagaggtgtcaggctgcacccccgagagtggtttggacagggccacgcctggacagcaagatcaggcaggtggctgatcccatctaaggcctctttcctcaggaaaccaaggcagaaagccccagccaaagtccacttttcacaggacgtgcagccactgtgtaggcagcccacagaacatggcctgtgacagactagtggagcaggtaacctggccaggccattgcctgtggcacgtgtgtggcatgccccttcctgcccactgagtagcagatggtagtggagaagtggtagaccacaggcaggggaaactttagaatgcagaaagtctgaaatgataatagcacaccaggtttccagagcattttgtggttgcatttatagagtacattccgatcgttgacctcatttagtcctcaccagttattctctggctctataagtaaggagacgctttgagagacaagttcagagagtttcagccacctgcccaagcgcacacagctagtaagtggccaagccgggatggggcctagggctgatggactctcaagtttggtgctcttctgcttcttggctctgctgggggtcagggcccaggttcagccctgttccaccacccttgtccttggagagaatgaagaagaggaagctcagtgacgctcttggccttctgcctcttccattccccggccccacccccatcttttgggtgagggctgagttggctgtggtgttgtttgtcagctcatagaatgtcagagctggaaggacctctgaggccagcccttcattatacagagacacagggtccccaagagaaagcgaccagctcagagtcacacagcaagaacaggagcctgctgttggctcattcataagcgtcaccccggctcaccttttggctatttccagcatgtgcttttgtctttatttttctggttgacacattcctggcactcaggcagtaagacttcaaacgacatttattttaaactttatttgtgactgtctttagttttactgtctggagaatcagatgcacaccttcacttagctgtgaatgtcacctccacccagcccagtgcccagaggccaaaatttggcccagatctctccttacctcctagccccagcaccaggtgtattcatcagaggagcccaggtggagggtgcactgggccctctgccaagcttcctgtggggacggcaggcccagtagcctttcggccagcccgtctctgggggcactgcctgctgtggaacggccagagctcctgttcctaggtgggtgaccagaccccacacagcatgggcaacctggcccaggtcccttatctctctgtcccctggtccctttgcccaaggaaaggcccccctctccacaccatctccctatttttggaagccctctttgcagacttctccctgctctgggagtcggagcttgtgggccagccttccatctccccttgcaggtatgtcagtggcacctcccagtgaggagatgggttcaaggggagggactgggttggccttccctttgcatggtactgagtgtggagtgtgtggcaaatgcatcacacaccatgtgtccctggagctgtataaatgaggctggtctagggggtccaggacttgctttatccaggaggggagcaacggacctggccacttccatccccacagccctgtttctgtgtttttggcaggatgcaacctgaagatcttcaacaaccaggagttcgctgccctcctggcccagtcggtcaaccagggctttgaggctgtctaccagttgacccgaatgtgcaccatccgcatgagcttcgtcaaaggctggggagcggagtacaggtcagttatgggtgctgcctacatcaggggacccaactccaggtgactctggacagcagagcaggcagggctcctcagagatgagctaggccagccctagcgtcaagagcagaaagaccaaagatcagagagaggccaaggcctggcaggcaggaggggccgggccaacagcagatgatgaggaattgcagaacgatgtttgctggcaccgaacagctgtaggcactgtaaacacacgctccatcttatcctcatcccagccctgggtggggatgccagcatcatccgtacagatgagagaactaaggcccagggagggagagtgacttgcctgcagtcacactggtagaagagctgtgtctagaactctgccctcttggcttcttccttagtctcattttaggcagatggctttaggatgaccctcttcaggaagttaggtcttcagctcattgttcctctcctcctctgttgctccatttctgactcagggaccctggtgatgctgaggagcccaggatattaaaactgagagtccgggaagggaggaggagatttgggtagttataaaggaacaaaattttctcgctgagaaatgacttttttagagtcctacatactggtttctttttctttttcttttttttttttttttttttgagatggagtctcactctgtcatccaagctgaagtgagtggcaccatcttggcttactgcaatctctgcctccaggacgtgcctcagcctcccaagtagctgggactacaggtgcgtgctaccacgcctggctaattttttgtattttagtagagagggggtttcaccatgttgcccagggtggtctcgaactcctgagctcaggtgacccacctgcctcagcctcccaaagtgctgggattacaggcgtgaaccaccatgcccggccctagatactggtttaaacatggccctgatatagtcaggtctacctggtctgcttggttgaatctctcaggccatcctgctttgggtttagagaatccagtcccttttctttccactcacggaccaaagtttgcggagaggcagggctgtgtgcccccgccttctgctccacactcccccctgccagccgccagctcctgcggcagatgcagaggtgcccacatgtcagctagagccagcgccttgcaagctactctccctttctcttcatttttccagatgtttggaatccattttgttttgcagtcatgctgcactcaggccaaacccatttcaatattggccttgggccaccgtttgtaatgaaatccagatgagcatgacttatggaaagtcagattctcattagaggatttcatcctgtaaaatcctcctcttccacttaccgtattttagctgctgttcttctgtgtctgccccagggtgtcagggaacacagccccttggtttcttgggtgtctctgaaatccaggagtgaccagtggagcaatcaaagtggtcagacctcaaaagaacttacaactatgttatggcctgaagagatcagcccaggcccaaaggtctagccagagaaatgttttaagcaatcttttagccctggcttagctcatttagggaacaggagtgaaaggttagaaaattaatctttttttagtggagaagggaaatatttaaagatggactgcagtggaaaagagtaaggggatgtccatttgctcttcttataccagactgtagtctggagggccacactcaggtaccctcgctcgtgcagacaccccagggtctgtctgcaggcccatttctcaacctccctgctacacaagcaaagtagaggccaagcaaggagggtggtgccttcaagacagcaacactgttcctggtgtggcattgcagctctcccgctccaagtgctaggaagaggctctttggtggcagagcctttccctggggacactatcaccacgcgggatgtcctgccagcacacccagtcctctgtggcccaccgcgtcaccgctgcctggcagcactgcacagcagcctgacgggcgggcgcggccccttcccagaacagccttgtcgtcctcctgcctcttgggccaaggagagtaaggtttcagctcttctctctgtgaggtggctgaaagcagggcccagggcccacacctctcacctccagctggcaccagcgactccagcctcagcagatagcctttgctcagtggaggcctttgggagcctgcctgcaagctgcgtcatcaactagcctgaatttagacaaagtgctttggggaaaagaaacgtgtggtgtgccttgtttttttccagtaattgttccatggctcgttctgcttgtaagattttccaaaataaggccgtagatgagaattatatcagcacattgggaaccgaaggcatgcggacactgttggcgctttgtaaaaaacacccctcaatcagacagacacacgtcatcgtcgcctgctggggctgggcccagatttcgagataggggagcggcacgtgcccgtttggtacagatgggagccaggaagccctttgctcaggatggaggtctcctctattagggggcctgttacagtaactggtgggcctctggggtaccctgcaattgactttacatatttaactctttgccattgactttacatgtttaactctttaaagtcgacttccttccccctcaagagaacttaatttactcaaagtcctccctgggtagaggagtttggccgggtagtttcagcaagttactggtaccgcttctaggacagcgtctaacagcatctttgggaagatgactgtcaccaaagcagaaaaagctttctgacttgtgtaaccccctggagattttttaagtcccccaccccacccctttccctatttcttacaggagacagactgtgaccagtaccccctgctggattgagctgcacctgaatgggcctttgcagtggcttgacaaggtcctcacccagatgggctccccaagcatccgctgttccagtgtgtcttagagacatcaagtatggtaggggagggcaggcttggggaaaatggccatgcaggaggtggagaaaattggaactctactcaacccattgttgtcaaggaagaagaaatctttctccctcaactgaaggggtgcacccacctgttttctgaaacacacgagcaaacccagaggtggatgttatgaacagctgtgtctgccaaacacatttaccctttggccccactttgaagggcaagaaatggcgtctgctctggtggcttaagtgagcagaacaggtagtattacaccaccggccccctccccccagactctttttttgagtgacagctttctgggatgtcacagtccaaccagaaacacccctctgtctaggactgcagtgtggagttcaccttggaagggcgttctaggtaggaagagcccgcagggccatgcagacctcatgcccagctctctgacgcttgtgacagtgcctcttccagtgaacattcccagcccagccccgccccgccccgccccaccactccagcagaccttgccccttgtgagctggatagacttgggatggggagggagggagttttgtctgtctccctcccctctcagaacatactgattgggaggtgcgtgttcagcagaacctgcacacaggacagcgggaaaaatcgatgagcgccacctctttaaaaactcacttacgtttgtcctttttcactttgaaaagttggaaggatctgctgaggcccagtgcatatgcaatgtatagtgtctattatcacattaatctcaaagagattcgaatgacggtaagtgttctcatgaagcaggaggcccttgtcgtgggatggcatttggtctcaggcagcaccacactgggtgcgtctccagtcatctgtaagagcttgctccagattctgatgcatacggctatattggtttatgtagtcagttgcattcattaaatcaactttatcatatgctcttttaaatgtttggtttatatattttctttaaaaatcctgggctggcacattgactgggaaacctgagtgagacccagcaactgcttctctcccttctctctcctgaggtgaagcttttccaggttttgttgaagagatacctgccagcacttctgcaagctgaaatttacagaagcaaattcaccagaagggaaacatctcaggccaacataggcaaatgaaaagggctattaaaatatttttacacctttgaaaattgcaggcttggtacaaagaggtctgtcatcttccccctgggatataagatgatctagctcccggtagaggatcaccggtgacaactatagcagttgtattgtgtaacaagtactgctcccagcagcaattagggagaaaactagtctaaattatttcaactggaaaaaagaaaaaagagtcctcttcttttcccagccttttgcagaacacagtagacagaactgccaccttcaattggtactttattctttgctgctgtttttgtataaaatgacctatcccacgtttttgcatgaatttatagcaggaaaaatcaagggatttcctatggaagtcctgctttattccaggtgaagggaaggaagtgtatatacttttggcaagtcatacagctcaaatgtgatgagatttctgatgttagagggagatggagaggcttcctgatgcctcatctgcagggtcctgtgcctctgaagttctagccatgaggtttccaggtaggacagctgctccccaagcctcctgaggacacaggaagagacggaaggagcaccttgacagacttgtgtgagtcttctcgaaggagggttgactcagaacccagagacaatacaaaacccctcacttcctctgagagggccaaatgctgtgagtctgaagtatgtgcctggtgtgaaatgatctatggcctgtttcttacacaggaagccccctgaacctcctgtacatgtgttcatgttcccagccagctctgagacccaggaaccaaatattccattttggcttctgctagagcagtcatggttcctctcctaaaagccatgggcagcagtttccgagggcctgcatgatccacctgctgcacgatcctatgagggcttcctgtggcacacagccctctgggtgcttgggaactagcttcaggcacagcctgattctggtgatccagtgatctatggaagtcgtgtcttactccaggtgaagggggaaaaaaaaagcctatactttggcaggttatgaactttgaatgtgatgaaatgacacgtttggctgcatttggatggtgtcttagaaccctcattgctcagacctgaaggctacttctaggagcatgaagtttgagttttgtgtttttccaaaggatacttccttggccctttttctttattgactagaccaccagaggaggatgtgtgggattgtaggcaaacccacctgtggcatcactgaaaataaatttgatcatacctaagaggttaggaaatggtgccattcccaccttagagtgctacataggtgctttgggcgtatgtaacattagtgtccttccttgaagccacaagctagttttcttagttttaaaatcctgttgtatgaatggcatttgtatattaaaacacttttttaaaggacagttgaaaagggcaagaggaaaccagggcagttctagaggagtgctggtgactggatagcagttttaagtggcgttcacctagtcaacacgaccgcgtgtgttgcccctgccctgggctccccgccatgacatcttcaccttgcagcttgtgctgagactgacccaagtgcagctagcactgggacacagatccttgtcttcagcaccttccaaggagccaacttttattccctttcctctctcccctccccacctcgcttcttcccaatttagtaacttagatgcttccagcacatacgtaggtagctaccccagccggtttggattacaggcctgtgctggaacatcatctcagttggccaccttcctggcaggctgtagacctgacattttgagacaagcctagagtcaggagcagggactttgactcttaggaagagcacacatgagggcaaggctgctggcagacgtctccattgtccttatgttgtctgtgttgtatttttttttttttattgaccatggtgattatttttttaaaccatcgttaatatactgaagtgagctatagcacatatcatgtgcttagtttgtttatttttctccatctccccttggcttcctagagtttggacatattccaggctaaatgcttttactcaagactacagaaaggtttgaagtagtgtgtgcatggcatgcacgtatgtaagtaatctggggaagaagcaaagatctgtttcattcttagcctcaggcctcatgagggtctccacagggccggagctcaggttacaccactccttcgtccttacaggagatgtagggagaagaatctgcaggctgcttgtaggactgttcaccaagggggataccagcagcaagagagtgcacccgtttagccctggaccctgtttcttactgtgtgacttggctagagttgggagttcccccaaaataaacgtgtccccattttaccagaaccaaacctcaacacagcgaagctgtactgtctttgtgtggcaaagatgttcccttgtaggcccctttcaggtaaccgtcttcacaatgtattttcatcacagtttaaggagcatcagccgcttctcaagtgggtagggaaagcagaaaaacgtacgcaagaggacatggatccaaaatgatgatgaagcatctcccatggggaggtgatggtggggagatgatgggctaaacaggcaacttttcaaaaacacagctatcatagaaaagaaacttgcctcatgtaaactggattgagaaattctcagtgattctgcaatggatttttttttaatgcagaagtaatgtatactctagtattctggtgtttttatatttatgtaataatttcttaaaaccattcagacagataactatttaattttttttaagaaagttggaaaggtctctcctcccaaggacagtggctggaagagttggggcacagccagttctgaatgttggtggagggtgtagtggctttttggctcagcatccagaaacaccaaaccaggctggctaaacaagtggccgcgtgtaaaaacagacagctctgagtcaaatctgggcccttccacaagggtcctctgaaccaagccccactcccttgctaggggtgaaagcattacagagagatggagccatctatccaagaagccttcactcaccttcactgctgctgttgcaactcggctgttctggactctgatgtgtgtggagggatggggaatagaacattgactgtgttgattaccttcactattcggccagcctgaccttttaataactttgtaaaaagcatgtatgtatttatagtgttttagatttttctaacttttatatcttaaaagcagagcacctgtttaagcattgtacccctattgttaaagatttgtgtcctctcattccctctcttcctcttgtaagtgcccttctaataaacttttcatggaaaagctcctgtgccaggagctcagtctgattcttgctgctgtctctgggtggagagaagatttaaaagggagccgaggcgggggtcccagggacttcagggctcaggaggaccagaggaaaatgtctgtaagcccagatataccttgaccaatgatgtaccaggccacattctgctgtggtcctcatgtaatacccagctgccctcattcactcaccaagggcaacatgcagtgccagcagaagcccctgggccatctgcacaaaggtcaaaagtttctcaatgggtgtatctcgctattccgcaaacctaaacaccatgtgtcccactgatgctatctctgcagtgccattttatattttacttcctctgtaccccgaggcctttggcaaatgaatgacaccaacccaacctcaagccctgccacctcttgcctctgctagtccctcctagcctgattcctccatattgtcagggtgtcttaaatgccaccagatttgtcttcccacaggcatggaggttcacaagtaactaacttggtttccacatctgccagctcagatgactgttagcacctgtgaaaattcattttgaattcaaaacacccaaggagaaagggacttcaaagttgtttccttggctagatcttacactgaccccagaagatgtggataaagaatggataaagaaaaacgctgattaaaatgtaaactgttggccaggcgtggtggctcaacacctgtaattccagcactttgggaggcagagacaggcagatcactcgaggtcaggagtttgagaccagcctagccaacatggcgaaaccccgtctctaccaaaaaatacaaaaattagctgggtgtggtggtgcacgcctgtagtcccagctacttgggaggctgagatgggagaatcgcttgaacccaggaggtggaggttgcagtgctcataccactgcactccagcctgggcaacagagtgagacactgtctgtctcaaaaaaaaaaaaaaaaaaaaaaaagaagtaaaatgccttttggtttttaagagtctgaataagcagagttcgggggagaaggatgaaatgggttggagtaatcatctggtgtgaccacatctgcagcagtcctcctaaggacctccccagcatcatctaaacacctcccttaccaagaggaggcaggttgcaccgtaagggcctatagatttggcctctgagaactgcaacaaattcctgcctttatgatgatttggttggttcttccaccttcctacccccttaacagctttcctcaagggtttatgtagctgtttgggtcaacagctgacccaaacccgtccttttaacccaacctgttccttgagatgcacgattttaaaattccagctatttgttagacgtgatccaaaacacagcgcccccaaactgaatcatcttcccacctcacttgagccagctcccttttatgcttccccagattttatcagtagcctcttcactcccattttccaagcccagagcagcttgacgcatttcttttccttgccctccatcacctctctgctgctgccatctcccttttggaaaggtcctactccctgaacttcccggttctccctggccctctcgtacaatctgctctttttcttgggcctacacctcttctgcctgcttccttgttggtattcccagaccactgttctgctgactcctccctaagtgatctcatctaccctgatgatttcaagccacataaacgctaatgactcccaaatcagtacttacagcccagactttaatcccgagcttcagactcatgtccagctgactgctggctgctggcacacggaggggccacaagtacctcaaactcacaatcaaataaacagaattcatggtttctcttaaaaccatcctctggccttcagccctgttttagacatgaccattgacccaacctacatccacagaagccacagcagtccaccagtcctctgctccccacctccacacagtcccgcttctccaatctctctgctctagtcccacttgcaccgccctaaactgcaggtcttctagtgcctggacaactgcaccagcatcataacaggtctcctagcctccagatggctttcctataaaggcacccttcatactgcccccagtaaccaatctgaccatagatgcttcccctagtccactgcacacattctaaggtctttgccctggagcatttggccctcctttgcccttacctagcattcactgctccctgccttaacctctacaatccggcaacttgcagtcctcatggatcatccttgtcttcatggctgcttgtgcttagaacatcaacttctccctggcccagcccctgctccccagcacaccaccagttcgcctggctaacttttactaatgctttgtgcctccattcagacatctcctccaggaagcctctcataaacatctatctctgttgccacagtcccctctctaggctgtgagttccttgagagcagagtttacattttattctcttatccctggcttctttttggccaccacatatttttgccgagtaaatgaatcagtgtccatatctagtaaattctatcttagcagtatattttatatacatttccacagtgcttacagcaagtccttatatatgactgaaggaatatagttcctgattacctgctatcacagctattccaaaattctaatctgtgtctctgcagtccagggatagcaaatatatggcaaaattcccctcttctctatttctatccatggcaaaaaccactcgtcaccgggttgggtccatcctcagcctcagactctttctcaacacagctaattggttagacagaaaaactgctaatactgctgccacgttttcctggaatgtaattatggttagatgccttttctgctcaaaacctttggctcctcacttacctccagagtaggcacagactctacaaggtcccctccagcatcaccccatcctcatctgccaccatttctctatgtggactccttgcattttcccagcacatcccctcactcttctttccgtacctttgttcaagccataactccaacaactttgctgcctccactcacctatctgtcccaatcctttatccttctagctcgacccaagcagcattatttcccctaagtcagcggttctcaaagtgggtcccaggaccgaaccagcagcatcggttatcacacagatgttaaagatgcaaattctcaggccccacgccaggcctactgaagccgcaactctggagtggggccctccaggtgactgtgacatagctcacttctgagaaccattgctctaagatacacttcctgttctccccaacccactgtgttctctccttcccacagccattagggctggtcacagcactcttcacatgctgtcttggcattgtcttttgtgaccttgtctggtttgccccctgctcccacctgagttggactctgagctcatggaaaggagaaactacatcctgactcaagtctgtgtcctctgccacacctagctcagattctggcaccaacgacgttcacagtcagtgttggctggaccctgggttcttgtttctgctctcaccagggtagaaggaacaaatttaaggccgtctaacttcaccattaatgacttcctgagaatttcctggggaagcatgattgttgcaggccatgtccttggaattcagattaaaagaatcttttctctcctaaactatgctgttgtttccataaagttcctaccctaggccttagtccacatttttgtgtaatagcattaaagccacctggctgataatagcaagggcaggagcaatgattggacacttcattagagagaacccaagaggcttcctagtcagtaaactgggcataagcaagcagcttggggtgcctggttatgcctcccagatctgtagttgtgcggaggaagtgtttgggcataacaatggatacacagaaaggggttttaaaagtttttttttttcttttcacccccaggcctgtgttccaaagatgcagtaataaccattagggccaggttttgaatcacaatgttttcaaaaggaaacaaagtagaactgtaaatccctaagagtgggaatacgctattgctgttaccttttttgttaattcttctgcaaaccagaggaacaacttaggatagagcaagatacttcctatgctagaacctaattctgagtaaggatacctacattaagagcaagctttgtgatgttaacaacaggcatatgtaatgccaaagtatgaactttacaggatctctaagacgttttctgtaagagcttacatgccaaagatgccaggatggatcactaaaccctgagtggaatcgaaaatactagaattatgccgcacagtcagcattctactttcatgagacatacaaattatgggaaagttaacggggttgttttcaaactaaccttgtactaacatagtactgggttcagtacacatgaccagatttttttacacttactccacctatagtcctctaataagatttggtacttaatgacataatgctgtagctaaattgtctattgtaaaattaacaggggcagcagagagtgaagagcaaatctaatgcattagaacattcactgaaactcttgtctccatcaatcagaacgttcaatgaatcagaacccctaatgaatcagaacctctgaccacactggacacgtttgctaaatttagctttgtatcggcaaacgctgaagctcagaatagtttacagagctctcatcttacccttagacagtgattcttctaagactgcttttccatggcaggccaaggcaaggcaaggggcattccacatgctctctcaacgcccattgttaagagactggcccaaggttaaatgaatctgacaagccatggcaaaaatgttgatcccgacctctccacagtgggaccaggaaattagccatatatcacatttcacgtgttagaagtagtttgcaggaatggcctaacatgctctatggtccttgaaccacatcccatattactcaaccatctaagtctagcttccctgaatctctagcttctctgaattagacgtggccaagttctataaatagagagcaagcaaactggttctgtcaatcttctcatactctggcaagatggcatattttaaaattataaaaatatctatgtcttcatcactctaaaattattacataacacatgattttctcaggggaaaaatgtttattcttgtcttcccttaccttccagcacttatgtatggaccttcaaactttgtgatcatattcatcaaacacaaaccatactttacaaccaaaactaagggcctactatgtgccaaacactatgtgccaaacactatgttatgcaaatcaagaaatgtttaaggaaaaaacaaccaaaaaccaagtctcttattttaaattccagctggcaattctgtaacaacttgtggtagcatgaacataggtcactttagatagactgcagctattactgtagtgttagctcatgatcactattctaacatgggcttttagtagatttcactagagaccttcatcccatatgtccctagaagaggccaatatccctgcatagctgaggtcttaaaaacatgacattacatatgcagggtaaattctaaaatagtgagcttgacagactcttccactattcactatatatgtctaatccaatgaaggatatagggcttccctcactcataccccctaataaaaaaccacaaaatcataataatagacattagcacagtttataaataaatcacattttaatcatctggctttgtttaatctacaaaatcaaattcacagctttttctagtctggtctgttttttctaaccagatggcctagtatattttctaaaaccttccatcttttaaggaaaacatgttccaccttttttttttttttgcaatcccagagccaacttccctaatgcaatcacctcaaagaaacactgatgggctggtggtgaaccacagactcaaagtctttcagaacagtaaaagaaaaaaaaaaaaaaaggaacaaaaggtcactaagcaatgtccagtgttccctggaaagcctcttcctgaatgctccagtcactgagctgtcccctccctgtggtcactcctgctggcccctgtagcattccattccttctgccatctgtttcaggttctgcagtgcttataaggtagtgtctggaggggtgtgagccttatttctttctgctcctaacccaacctgtttctttcatgctgtgtaaatggttctagagcccacctaggccagaaccagttctcagctggtgtgcgggcaccttccatccactgtactatgtgccagttcagagccacagcagtaatgatcacagtgagggctaatgatatgcattacaaagtctacaaaaacaaataaggatttttatttgcagtactttccactcttcctttaaaaacttgccatttgcttatcagttcctctggggctga

SEQ ID NO: 2298 - DNA, 2991 bp, Homo sapiens
cgggagcgggagcgcggcgcacgccccgggccggcccagccagcgagcgagcgagcggcgagccgggaggaggagggtggcggggcggtgaggccgcagaggcggagggatctgcgcatcaaagctagcgaggcgagcgaagtttggccgggggttggactttccttcccggaggcggcacccaaacagctaccccgtgcggaaacccaaacttctgctgccacttggagtctcgcggccgccgcctccgccccgcgttcggcgccttcccgaccctgcactgctgccgtccgcccgcccggccgctcttctcttcgccgtgggagccgctccgggcgcagggccgcgcgccgagccccgcaggctgcagcgccgcggcccggcccggcgccccggcaacttcgccgagagttgaggcgaagtttgggcgaccgcggcaggccccggccgagctcccctctgcgcccccggcgtcccgtcgagcccagccccgccgggggcgctcctcgcgcccgcgcgccctccccagccatgtcgtccatcctgcctttcactcccccgatcgtgaagcgcctgctgggctggaagaagggcgagcagaacgggcaggaggagaaatggtgcgagaaggcggtcaagagcctggtcaagaaactcaagaagacggggcagctggacgagctggagaaggccatcaccacgcagaacgtcaacaccaagtgcatcaccatccccaggtccctggatggccggttgcaggtgtcccatcggaaggggctccctcatgtcatctactgccgcctgtggcgatggccagacctgcacagccaccacgagctgcgggccatggagctgtgtgagttcgccttcaatatgaagaaggacgaggtctgcgtgaatccctaccactaccagagagtagagacaccagttctacctcctgtgttggtgccacgccacacagagatcccggccgagttccccccactggacgactacagccattccatccccgaaaacactaacttccccgcaggcatcgagccccagagcaatattccagagaccccaccccctggctacctgagtgaagatggagaaaccagtgaccaccagatgaaccacagcatggacgcaggttctccaaacctatccccgaatccgatgtccccagcacataataacttggacctgcagccagttacctactgcgagccggccttctggtgctccatctcctactacgagctgaaccagcgcgtcggggagacattccacgcctcgcagccatccatgactgtggatggcttcaccgacccctccaattcggagcgcttctgcctagggctgctctccaatgtcaacaggaatgcagcagtggagctgacacggagacacatcggaagaggcgtgcggctctactacatcggaggggaggtcttcgcagagtgcctcagtgacagcgctatttttgtccagtctcccaactgtaaccagcgctatggctggcacccggccaccgtctgcaagatcccaccaggatgcaacctgaagatcttcaacaaccaggagttcgctgccctcctggcccagtcggtcaaccagggctttgaggctgtctaccagttgacccgaatgtgcaccatccgcatgagcttcgtcaaaggctggggagcggagtacaggagacagactgtgaccagtaccccctgctggattgagctgcacctgaatgggcctttgcagtggcttgacaaggtcctcacccagatgggctccccaagcatccgctgttccagtgtgtcttagagacatcaagtatggtaggggagggcaggcttggggaaaatggccatgcaggaggtggagaaaattggaactctactcaacccattgttgtcaaggaagaagaaatctttctccctcaactgaaggggtgcacccacctgttttctgaaacacacgagcaaacccagaggtggatgttatgaacagctgtgtctgccaaacacatttaccctttggccccactttgaagggcaagaaatggcgtctgctctggtggcttaagtgagcagaacaggtagtattacaccaccggccccctccccccagactctttttttgagtgacagctttctgggatgtcacagtccaaccagaaacacccctctgtctaggactgcagtgtggagttcaccttggaagggcgttctaggtaggaagagcccgcagggccatgcagacctcatgcccagctctctgacgcttgtgacagtgcctcttccagtgaacattcccagcccagccccccccttgtgagctggatagacttgggatggggagggagggagttttgtctgtctccctcccctctcagaacatactgattgggaggtgcgtgttcagcagaacctgcacacaggacagcgggaaaaatcgatgagcgccacctctttaaaaactcacttacgtttgtcctttttcactttgaaaagttggaaggatctgctgaggcccagtgcatatgcaatgtatagtgtctattatcacattaatctcaaagagattcgaatgacggtaagtgttctcatgaagcaggaggcccttgtcgtgggatggcatttggtctcaggcagcaccacactgggtgcgtctccagtcatctgtaagagcttgctccagattctgatgcatacggctatattggtttatgtagtcagttgcattcattaaatcaactttatcatatgctcttttaaatgtttggtttatatattttctttaaaaatcctgggctggcacattgactgggaaacctgagtgagacccagcaactgcttctctcccttctctctcctgaggtgaagcttttccaggttttgttgaagagatacctgccagcacttctgcaagctgaaatttacagaagcaaattcaccagaagggaaacatctcaggccaacataggcaaatgaaaagggctattaa

SEQ ID NO: 2299 - protein, 423 aa, Homo sapiens
MSSILPFTPPIVKRLLGWKKGEQNGQEEKWCEKAVKSLVKKLKKTGQLDELEKAITTQNVNTKCITIPRSLDGRLQVSHRKGLPHVIYCRLWRWPDLHSHHELRAMELCEFAFNMKKDEVCVNPYHYQRVETPVLPPVLVPRHTEIPAEFPPLDDYSHSIPENTNFPAGIEPQSNIPETPPPGYLSEDGETSDHQMNHSMDAGSPNLSPNPMSPAHNNLDLQPVTYCEPAFWCSISYYELNQRVGETFHASQPSMTVDGFTDPSNSFCLGLLSNVNRNAAVELTRRHIGRGVRLYYIGGEVFAECLSDSAIFVQSPNCNQRYGWHPATVCKIPPGCNLKIFNNQEFAALLAQSVNQGFEAVYQLTRMCTIRMSFVKGWGAEYRRQTVTSTPCWIELHLNGPLQWLDKVLTQMGSPSIRCSSVS

SEQ ID NO: 2300 - DNA, 2992 bp, Homo sapiens
cgggagcgggagcgcggcgcacgccccgggccggcccagccagcgagcgagcgagcggcgagccgggaggaggagggtggcggggcggtgaggccgcagaggcggagggatctgcgcatcaaagctagcgaggcgagcgaagtttggccgggggttggactttccttcccggaggcggcacccaaacagctaccccgtgcggaaacccaaacttctgctgccacttggagtctcgcggccgccgcctccgccccgcgttcggcgccttcccgaccctgcactgctgccgtccgcccgcccggccgctcttctcttcgccgtgggagccgctccgggcgcagggccgcgcgccgagccccgcaggctgcagcgccgcggcccggcccggcgccccggcaacttcgccgagagttgaggcgaagtttgggcgaccgcggcaggccccggccgagctcccctctgcgcccccggcgtcccgtcgagcccagccccgccgggggcgctcctcgcgcccgcgcgccctccccagccatgtcgtccatcctgcctttcactcccccgatcgtgaagcgcctgctgggctggaagaagggcgagcagaacgggcaggaggagaaatggtgcgagaaggcggtcaagagcctggtcaagaaactcaagaagacggggcagctggacgagctggagaaggccatcaccacgcagaacgtcaacaccaagtgcatcaccatccccaggtccctggatggccggttgcaggtgtcccatcggaaggggctccctcatgtcatctactgccgcctgtggcgatggccagacctgcacagccaccacgagctgcgggccatggagctgtgtgagttcgccttcaatatgaagaaggacgaggtctgcgtgaatccctaccactaccagagagtagagacaccagttctacctcctgtgttggtgccacgccacacagagatcccggccgagttccccccactggacgactacagccattccatccccgaaaacactaacttccccgcaggcatcgagccccagagcaatattccagagaccccaccccctggctacctgagtgaagatggagaaaccagtgaccaccagatgaaccacagcatggacgcaggttctccaaacctatccccgaatccgatgtccccagcacataataacttggacctgcagccagttacctactgcgagccggccttctggtgctccatctcctactacgagctgaaccagcgcgtcggggagacattccacgcctcgcagccatccatgactgtggatggcttcaccgacccctccaattcggagcgcttctgcctagggctgctctccaatgtcaacaggaatgcagcagtggagctgacacggagacacatcggaagaggcgtgcggctctactacatcggaggggaggtcttcgcagagtgcctcagtgacagcgctatttttgtccagtctcccaactgtaaccagcgctatggctggcacccggccaccgtctgcaagatcccaccaggatgcaacctgaagatcttcaacaaccaggagttcgctgccctcctggcccagtcggtcaaccagggctttgaggctgtctaccagttgacccgaatgtgcaccatccgcatgagcttcgtcaaaggctggggagcggagtacaggagacagactgtgaccagtaccccctgctggattgagctgcacctgaatgggcctttgcagtggcttgacaaggtcctcacccagatgggctccccaagcatccgctgttccagtgtgtcttagagacatcaagtatggtaggggagggcaggcttggggaaaatggccatgcaggaggtggagaaaattggaactctactcaacccattgttgtcaaggaagaagaaatctttctccctcaactgaaggggtgcacccacctgttttctgaaacacacgagcaaacccagaggtggatgttatgaacagctgtgtctgccaaacacatttaccctttggccccactttgaagggcaagaaatggcgtctgctctggtggcttaagtgagcagaacaggtagtattacaccaccggccccctccccccagactctttttttgagtgacagctttctgggatgtcacagtccaaccagaaacacccctctgtctaggactgcagtgtggagttcaccttggaagggcgttctaggtaggaagagcccgcagggccatgcagacctcatgcccagctctctgacgcttgtgacagtgcctcttccagtgaacattcccagcccaaccttgccccttgtgagctggatagacttgggatggggagggagggagttttgtctgtctccctcccctctcagaacatactgattgggaggtgcgtgttcagcagaacctgcacacaggacagcgggaaaaatcgatgagcgccacctctttaaaaactcacttacgtttgtcctttttcactttgaaaagttggaaggatctgctgaggcccagtgcatatgcaatgtatagtgtctattatcacattaatctcaaagagattcgaatgacggtaagtgttctcatgaagcaggaggcccttgtcgtgggatggcatttggtctcaggcagcaccacactgggtgcgtctccagtcatctgtaagagcttgctccagattctgatgcatacggctatattggtttatgtagtcagttgcattcattaaatcaactttatcatatgctcttttaaatgtttggtttatatattttctttaaaaatcctgggctggcacattgactgggaaacctgagtgagacccagcaactgcttctctcccttctctctcctgaggtgaagcttttccaggttttgttgaagagatacctgccagcacttctgcaagctgaaatttacagaagcaaattcaccagaagggaaacatctcaggccaacataggcaaatgaaaagggctattaa

SEQ ID NO: 2301 - protein, 423 aa, Homo sapiens; identical to SEQ ID NO: 2299

SEQ ID NO: 2302 - DNA, 155347 bp, Mus musculus
  misc_feature (1)...(155347): n = A, C, G or T/U
tccggctcctccctctcccgcctcctggtccccgccatggtgctggagtcggtggtcgctgacttgctgaaccgcttcctaggggactacgtggagaacctgaacaagtcccagctaaagctggggatctggggcggtaagcgcgatgccacggcctaccggcgtgggaaagggggctgcgcgtgtgggagcctgaggaccccgtgacctcgctgggcttgcccctgctgtcgatgtagccacacaggggcagcgcgctgcttagcagtccccatcaatgcctcagaataaaacaaggaaaaaaaagtaattatttacctcagcagcggacgtcagagtgtggctcatgctccctacggtgccagattgtctccccttgcatctcatagccccaggaccaggcttcctggttcccagcccggggaggtaggatgggcaggggtgacagtgagaagaaaggcatgtcttgtcccctaggacttttaactcagagattcctaccattgcccacttcctagttaggtagagggctctgcaggtttttgtttttgttttgaaatagacattcgagccactggccagaggcatgattaattagggttgtctgctaggatgcaaattcgagaaaacctgctaaggttattatcctgacgattaggagtagaaaagtcttatgataagcagcctacttctgcattcttcagtaaacttggatttgggagtgtatctcagtggcagaacttgtgcttcgagcctcctcagcaccgtagaataccaaaacagattgggtgtttggagggtatgggggggtgtgcttgtattcatatactaagttactataaggcttgagaattttgtcagctttgggaggaaattaaaaaaataacatccaacttaaatggatggagctacttttaattgtcagcgatttaagtataggctgggtctgtcaggttggcatttgccaatggagaaactagctgttaggtgcttgaaatgtggttacttgctctgagtataaagtactctgggttttgaagataagcatttttcctaatggaggaccaaaaaaaattagcatctcaataaattttatgttggctacatgttgaaatggtatttgactagatttgagttaaatacattattaaaattcagacccatcatcaactacaaggtcaatttatgatgaggttacaagaaatataatcaggaagctaaaaggcataggctgttcccatccgctctgctcggcttgcttatcgctatacctagcacgagcaattacaaaggatttccacattatgtctatcaaaactctgggctcctaaaatcggtgattagggagaggcaccctatttttattggacaatgtgaattatgactagtctcctgaattacattggaacacatatttattttattttaaaacaggtttctttccataaatacacattttgtgtacccgtccctgctacataatacaaaaggaaaagtttttaaaaggagcatccagatccttctgcacaaagagagggcgagtgtttctttagaattctcgcagtaatgtcagttattctttgtgaaacggttttgaaaagagtgcttcaggtcagcgtgaactctaagctagaactcctatagttctaggcctgctagtgtgttgggcaagccatttacagtaaaagtaaaagtaagtaaaaacctttggtttttctttccgcttccacagagaaagcgattgtatgttcagaggagtttgaatcacacctgacaagatgacattcccattaaccactcctcgggttttactggttgcctggtcctgactttagttcttttaaaaaagaaataaaatgtatgggtacggttgaagattccttcactaccaaatcgtgctcacttttaagggttggagttggacacgttagcatctgaggctgttcagtttgtaaaccgttggacagtgaatagagtctggagatttccagcttattcacactgaatctaagggttacagagctgtgtcgtacctcccgcctcattgtctctagtgaaatctaggaatgagacttttcttttttttccttttctttttcttttcttttcttttctttttttttttgagacagggtttctctgtgtagccctggctgtcctggaactcacactctagaccaggctggccttgaactcagagatccatctgcctctgcctcccgagtgctgggattaaaggcatgcgccaccacgaccggctgagacttttctttatcctgttttctgctttaacttactttgtggtgctagggcttcaagtccagaccttgatggtgcccagtgatattctgcaatgagctaatatataccctcagctccattttattattttattttatttatttattttattttatttctagaataacacattctgccagtagtatgccctaactgtgcagtgtgtctgagcagcagatacatgggtttctttcaccagctgccctgggaacaagtcagcgattgcattttgtcgctcacagctctgccctgtaaagtttaactaatggtttctggatgtcatgtgctttgtagttattgctcaacacgtggtcttctaatccgattctccttaaaatagaaagacgagtctgagttgactattactcaagacaatagtgctggagaaactggtcttaacctttatggggtcaggaagcagatgggatattaatgaaatcgttgataaggcatccatggtgctgacaaagcttttcaaggaaatttgaaagtgatatgcagtcctttttgaaagctgcatgtgtgttagcaggtaaaatttatatgtcagtgctttttaaaaaaatcctttttaaacctttgcatgttccaaactttagaatgggggggggggactcttcctgtagaagttttacatatgtagttttttgtttttttttgtttttgttctttggactagagtgttaggctagccccaagcagttgatttcagtgtcaggagggtggtttggcagtgcttgaaatgctgttgactgaggaggttgctggtgtgtgttaggtaggttctaggaatactgctgaaaccacctggtagtgtgagagacggacagtcagtaaggaagtgctgtccagccctgcacagtagttgaactggcctaaggagaaaatggagattgtctcttgtatataatgagacctagggggttaacagcttttactagggagtaaaagtggatctagagagagtacattactcttaagagatttctaacaagacaaacaggtatcttaaatgactgacatatatcttatgcacaaacatgcatgatctttgttttgatgtgagttttgagagtcaaaatatagtgttactataacctgaaaaacattgtgttgggcctaggaaatatccacacaacgaaacaatgaaagcctcaataaagaagaaaagtgtagcatgcaaaagaaggagcgagggctggagagatggctcagtggttaagagcaccaactgctcttcaagaggtcatgagttcaattcccagcaaccacacgatggctcacgaccatctgtaatgggcatccgatgatatctctgagacacggacattgttctaatcctctttaccaggcctttctgttttctgagcaaattttttttgtctctaagaaaaacttctcaggggactggagagatggttcagtggttaagaacaccaactgctcttccagaggtcatgagttcaattcccagcaaccacataatggctcataatctctgtaataggcatccaggaggagaaggagcgagttgttagaaagtttagtcttgttatatatattctggaagttgcttttaagttgaagaacgagcaaggccagcaggatggcaggctcggggtgagcatgcttactgccaagcctgagtatcagagttcagtccctgccatgcacctaatagaaggagagaactgactcctgcaagttgtcctcagacctcacgtgcaggcacaacggcaatcccccatatatacaaatgcaatagtttttcaaacctttgtaactgaagaagagaggcaataataataataataataataataattcagagaggacataaagggctcttaaactttgtgactatcttttggaactactactacttcttcttcctcctcttttttttcttctccttctctttctctttcttctccttcttcttgaaatagggtttctctgtgtagcgctgtctgtctgtctgtctgtctgtcctggaactctagaccaggctggactcaaactcagagatcctcctgcctctgccttttgagtactgggataaaaaggcatgtattaccacctcctggcttggattttattcttaaaagattatttaatgccacacagttcttaagtatttttgaaagtggtttaggcaaaatacatttttaaaacttgctgctgtagaaacagggcccagctcactacttacaggatcccagaggaaaacgttttccttctcaaagcctcagtttcctaatctgtaaagagaaatacaacaggaagtgtccgtgatggaactcctgtcattgttagtgatggacggtaatggtgggcgggtcagcccgctgttgcattttctgaagcatgtttcctctgacatcatgcatctgctagcaccatacctgcatgtggatatctttgaccctccctccaaattcttaaaagcaaggaaatcttttgcaattaatttatacttgacaatgctcacgttttctgtaacagtgtgtgtaggacagccttcaaaggctcagacgtgtgcctggtgggcaggtgcttccagatgaaaatgtttacctaggcttttgatccccacaaaccagcagataaattaacagcccctggctgtttgagaggtatccagggtataattgttttaagcgtaacatgtctctaaaacagtgtgtcgaaatgtcagatcttttgcaatttgggttaagtggtgttgcaatgtagaatctgccaatttgattttttcaaagcttttttttttttttttttactgtggaggaacaggaacagcttccattcaggactctgtggctttcacttcccttaacccagcggactgaaccttagacatgtgtgttaggatgacatccccttaagccaggctctgagtgtagtttcagctcctgtcctttccctcggaggcccttccctgtctgcccacagctatgggtggagttcttattctcaatgctgaggactagaattgctgtagattctggattttgtgtttttagaacttagaatattgataagtgtgtaatgtgatttcttggggatgacaaccaagtgagtataaaatgcagttgtatttcatatgcatataatgcacatagccttacaattatttccagcatgctgcatttcaaagcagtgtaccatgcaagattgggtctgtggcaacatgtcagcacccaaaagttttgaactttagatttctgatgatcagcttgtcttgctggcagaaagcagcacaaagaaggagagagagggtgaggaaattgggcaggaagtcatcttccaccaggtgtagggcttttggcagtcactgacaggaagccatctgtttcttctctgcaaaggaacgaggtgagcatgtgggtgagcatgtcttcttgggctttaagcacccgtggtttgagggagccgggagcagccttagcccttccttagggaagtggtgctgggctgcctgcagccagtgtgaggcttgctggcccaggcacagctctgtccttcttccttccatctgtactgatggggaagagccagtcacagaatacacacggtaaagaagccacatctatatgaggcaggtggggcagactggggatgacagaagaaaaccacctgtgtgatttgtgtttactttctttagccacattttataaaacactgtagtgtctaagtatttactcactgagggagtattttttaaaaaagaattttattttatttcatgtgagtgctttacctgtaggtatgtgtatgcaccatgttcttgcagtgcctgtggaggccagaagagggtatctgatttttttttttttttttgagttaggaatggttgtgagccaccatgtgggagctgggaactgaacttgggtcctctgtgagagcagggagtgctcttgaccactgagccatcaagtcctcatccccagaaggatttttttttctttttacaagctccctcctggcaggtggttgagtccctagtcatctgccagagctctcgggattctaggagaagtgacatacacgccagctaatttcgatatgcctaacttgctcaatggctgggcacttctaaacctccccacagctagtgcacccccccccccccccgtggtattcctgagttaacattcttttaaaatctgtatttcatctctgctaccctagacccagttggggtaatggcttctagggccactttcctggaatcttacatgtgggcaggcctttaagtctgctctctttgctttcccatcatggcgatcctcctgttcttctccctcagtcagtcccttttccccctgccatctaaaaatcctaaaagtccctgcctcgcctcccatctccttgcccagccattggctgtacagcaattcttcattaccaatcaaagccagttaggggcagggaccctcggggtgtcttttcagggtgaagtgtggcttttgggtgccgaattaagttaagcatttgaaccatttcccagcaaggtgggacaatataccaaagcggagtttggaaagctaaactgggtacacccatctttgcatgtacatagcaccatcattagttaaaaatccaccccttttctagaagtccagccagaagttggtgccttgaaaccacttgcagggaagccatgccttgggttttaggctctgtgtgtgtggtgtttgaaaggagaaagtcttgatgacttcggagcagctttctttctgcctttctctgccaagacttcttctttcaacaggaagctggaaagtaagagtcggttacttcctttttgctgcgtagcaatctcccaaccgaaacaatctggattggtttggtttggagtcggatagttcaattcatttggaaggaattggtacaatattttcttgggtgtctgtgaaaacatgagtcattacagtaaaccggttcgtgcttttgcaggctgctcggtggttgggaagagcttttgatacatttgatacaagggaagaagatggtggatactttcgctagaaccagatctgagaaaccttgcgtcacagcactgcataggcgtttgtcactggttttggccgtgtttagggtctggtgcttttatttgttggtcatttgttgttgttgttgtaccattgtttggattaatctttatggtttctattaagaactgaccagggagtcagtagctacagtggcactattaattactgtctaaccttggagaaactacccattcagcttgaatgccagctgctccatgcgatagtgcagagagggctggcagtgagcgttgtgtgctcctggagcactgctggcatgcagcttaggaactgtttgtagagaaaaggtctagcatggccatctgcagtgcctcctcccatgtccctgaggaattaccccttctggtgctcctgatgtaatcctctgactctatgcaacccactcatttttagattttatataaccttaaaaaccagcatggcaccaaccggcctggctctgactattgtgtggtaatggaagtagatttatttggtgggatcgagccctttacctgttctgccccattgtctagaagagagcacggtgtgtcggacatggcgttgagtgtcagaagactgagtggtggcctttccacgtgtatattgccatgttttcataggccgtttgtttaacctccagataccttcagtttctctttcttgataggtgcgtgctacctgcctcctgctgtgagactgtgggggatccagtcatgtaacacatctgaacatactttttgaaatattaattgaaggcctcatagtagttgtttctgccccagagctctgtgcgtcctaaggcaattaagcaagtgtttcctgagcaccagtgacgagggacactggtaaggaggtcataattgtgccgtggatttaggtaaacttaaactaccctggggagatgcagctcaagcaagcctcagtgagatcgcggagagattgtttctggttgaaattatttcttatcagcactagtttcctttttctttttgagacagtatttaaactccctgtgtagctgagggtagcacaagctagcttaggtgcccgatcctccagcctccacctcatgaatgactgctgggagaacaggcctgaatcaccaaacatggagcaacagtgtttcctgtgtttatttggtagatgaatacatgtatacaagcttttcttggatttagaacttaggcaagcctgtcctgtgttatgacagttccagttgattaaaaaacaaacaaacacaaccaaatggagtgtttgcatgtatgtatgtgcactgtttgtgcacctgatacccgaagaggccaggaggccagaacggggcattggatcccattggggctgggtgactgtgagctgcccagagtgggtgctggtaactgaacttgggtcctctgcaagagcagcaagtgttctttaaccactgagccacctctccagccccttggttgtctcttctaacttaaccactctttctttctttctttctttctttctttctttctttctttctttctttctttctttctttctttctttcttccttccttccttccttccttccttccttccttcctttctttctttctttaactttttccaattttttattaggtattttctaaatttacatttcaaatgctatcccgaaagtcccctatacccttcccccatccacccactcccacttgttggccctggtgttcccctgtacaagaccaaggggctctcttcccaactgtttctttttcttttttcttttctttcttttcttttcttttttttttaaagatggtgtaacttgctagtttagtgggcttgctttcatttctatctttaattcattagcacagattatttcatgcattctgattcaggctcaccatgttgagatacccttaacgccaaagctctctgtgtaactttccgcactgtgagctcaaagtaagatttccaaagcttcctcgtgagcagtgagtgaggtctccttcaaagctggactcctgcaccacactcctcacccagacccttcagccctgccagtctgcaccagaggtcacagagctccttacctgcctgtctccgggatgtctgtggacttgaggttaagcgccacctgatggcaagcctggcctcttgttttccttgctggcagagcatagtgtggctccctcccatcattcatcctcctgaccttgtttcttttctttatttttaagataagacacgattattgattctttgatttttttctcctgtgacctctaagtgttcttatctctggtgagctagctaaataggagggttacttctgtgtgtttgggatgactgtttctggaaggataacgccatcttttttaggatacttttttttccagtacccagttcagtatgaaatggttgatttttaggtcgctatgtctcagtcttacagatgatttaaatggaagtttctgcattcttagaccatgaactgggacacatgtacctgtgcctggctgaacagcatgcattgcgtcagcgagtaggctggtgcctcacctagccaggccacagtctcctggctgagggatgaatgcactttcccccattccctgggcctctgctaatctgcaagctgctaatttccctccctctcttttttactggactgggggcccctcccttagtgcaaatagctacaaaatgatattgctatggctaccctttatgtcatttatccaggaagtgtgaacagacctcgctgttctttgttagttttatgtgtctgaaagtaaaataggtgttgggtatggaaagggttcatatccaaatgctgagccaaattaacttcagaatttcattgttttactttttatttcttcatttttcccttattttgtgtcatgatttcaattaaaagtaatacctgataattataaaaactggaaaataatgaaaacagttaataaaaagtcacatttgtctcaccaacagtgatcatcactttcaatattctgtaaggttgtaaaatacactttaaactttgtttgccacattggcagtgatcaactgatacctgttacttcattgtggaaccacagtttactgcagtagaaacagccccatttttagaaagatgtacacattcatatatgtttctgcatcatgtgcatgcctgacacctgctgtggttagaagaaggcattggatcccttgcaactagagttactgaaagttatatgaagcctatgtggggtttgaaaatggagcctgggtcttctggaagaatagccagtacgcttaactcttgagccatttctccatccctagaggtctctctttacttaatggtaaaatctctcatgttgtactcacccacttgctattttgagtgattgctagtgatttactttagttaatggtcacatttgtctgatacacacatgctactgtcttagtgattgtgaaggtgccatttttagtgtggatgatctgagtactcctggtgacagtgaccccactcaccgagagtctcagagctcatgagcagctttggggtctgtgctgtccatagagcttgttaaactgctttgcatggctgaaaataagtgttgtgtgcaaatttcttctgttgactcgaataggggcctcagtagtaatctgtataagacatcagtatatagttaaatgcaaagccatctcagtacttctgtaaccttagaggttatgattcttcagaacggctctgtggggcgaggttaagggctttgtggctgagttcagtatccagcatccacatgacagctcacaactgcctgtaactccacttttagtggatttggcgccctcttatggcctccatagacactgtgtgtggtgcatagacatgcatgcggaacacacacacacacacacacaggattcctccaaatactgaatacatgtcagtcttctaggattaccttatgatttttatgtttgtagtggtgccatcctttctattctggtttcagaatttggctttactgtgatgggccctgtttgacactgaagttattggcttattttaggtagatatatatgtatgtgtgcatgttttttgggagaggtatttctgtatagaccagggtggcttggaattcacctgttctcaaactaatgtctctcagacttagcctcccaagtgctgtggtcacaggtatacactgcccgccatgcctgttttttcagattttaggttctatccagctgcactgtagaggctgccaaacagttgtatttgttccttctttctatgtacaaagctgtaatattttctgccccttcccagggctttcttattgcttccctggctttcttgttaactttcaacagtgtgctttagaaacaattgcatatacacaggaaacacatactgtttgtagaagaggcattgtgctgtcatagcttatatttggcagctgtttgttggtgttatgaatatacacatgcatatatagttttaaaaagttatttaaaaagtctgagccaggcggtggtggcacacacctttaatcccagcactcgggaggcagaggcaggaggatttctgagttcgaggccagcctggtctacgaagtgagtttcaggacagccagggctaaacagagaaaccctgtctcgaaaagaaacaaaaacaacaacaacaacaaaaaacaaacaaacaaaaaagtctggatggtatgtagccttttagaaaacgctagtctgcaaacatttttccatgtccctctttgttttgttctgtaatgcaggtatgttccggcctctgcctcctgctggaccttgagttctcacagatttcttccatctgtgttcttagcattgcatccttagtgtttgatagatgtaacatgttataataatggccgtattaatgttacatttcttgtctcccccccctttttttaaacaggtaatgtggctttggataatctgcagataaaagaaaatgctctggtaagggttattattttttaaattatgcttaataactcagctaatttggcaagctcttagaaacgtttggttactagacatctgtaccaggtaccagataaagtgactgagtcactccaagttgggttctttatttaactatttgtcattggaaatcatgagattaaagatctacagttttccatttaatgatcaattttttttttcaaaatgggattcagtccatgacctaatttgactatatagctttgttgtctctgtttctcttatagacatatttttcttcaaaattatctttatgcattttccaggcaaattagcatttggtggtaatcaatgacctaggctaccactggagcagtgcggtgacgttgttagccatagagtcctgagggaatagtaaggtgtaaggggggacttacccatcagctttagtgaggagtttgtatcatttgcctttgagctaaaagccaagcagccaagcagtgctcaccctccacccagtgaggatacattttaacctggtatgcaaaactgacatctgcttcccccgccccccaagcacatgcagtaatctaaagtgtgaggaataaaacttcttaagtgacatcgcagctaaataatacctaataggaactcagtgctgtctggttaaagtttagtaattctggagatttgaaattgttatgaatgagagttatggtttagtaccatggagcacagataaggcaaaatttattactgtttgttggtatgtgtcatttattgaagaggaatgctagtttggtaaatagcatgttagagccttcctttccagggggttttgtttactcatttgctaaatattatctgagaattattcagtgattgttttcatctgacttacgtgtacagactctgttcttttcttcttcttgtatttcaggtaaacagtgtccatctgtttcagttattaaaataaccagtttatgtaattactttccttatgaactgttttctgtttttcctgtttataattttgcttctttggaacttctttatgcaaacctaccatttagggaagcaatcatagctatgagttactcagctctatcattgatgtgcacaagggatttggggcctgtgtaaagatgacctttaatttttgtcttccttctgaagagtgaattggacgttcctttcaaagtcaaggctggccagattggtgagtacttcactctacatccagttgcttagttctctctctatagagttcattttgcctgtactgtttaacccgagaagtcttcttggcttcaccagaaacgtgggaattttttgtcttatattaatttcagagttctaagcctaatgtgcgtcatatataatacatatctactttaaaaaaccaaggagctagagaattactctaaagtggaatgacattagagctgtagttgtgacctctgggctttggctttcctacataaaacacctccatttccaaagtgatagtccggcttcctgtgcagtctctttatatttgtgaaagccatacagttttaaaactctgttcagtagacttaaatgaagctcatgcccctcctgtttgctcactcatcttcacttgatgtgttatgcagcagtgtggtatggactatgtgccttggtaagtacgaagtctccttctttgcagccaaactcttatccattattcataactcagcatacatgtctgctggagacatcaatatgaaattctatctacaaaactctcccaaatagttcaagtgacttgagttttttcctgttatatctatcatttatctgttgcctatttattatctatctatctatctatctatctatctatctatctatccatccatctatctatctattatccatccatccatccatctaatcaatgatctgtctaaagttcagctccagatgggttactatcactttagaatttgacttaatgacttagccactcctcatctacagcctgctgctagattacataatttactttcttcattgctatcctgctgaattttagctttatcctttaccattttagcatctttctcccccttatattgaaaatagattttttttctcacatagaagatccttattaccatttccccttcctctaaaccaccagttcttccccacctccccttctacctgagtctactctctttctgtttctcatgagaagataaacaagcttctaaaggataataatatattaatataatataatgacataatataacatataaagaagttaacatgtctgagttggacaaaacaaacaaggaaaagcacccaagagaacacacaagaatcagagacccactgattagcacgctcagcaatcccatgagaacactgaactgtaatctatgctacgtatgcagaggacctggtgcagacctgtgcaggccctgtgcatgctgcctcagtctctctgagttcatatgaactttgatcatgtgatgccttccatcccatctggctcttacactctgtctggctacctcttccttagggttacttgagccctgagggaagggatttgatggaggtgtcacatttagggctaagcattccaaggtctctcactctgtataacgtgcagctgtgaatctctatatttgttcccatctactgcaggaggaagcttttctgagggctgagcaagacactgatctatgagtatatcagaatgtcattaggattcatttgattgctacatttatcatcatcatcatcatctcatcatctagaactgtagtgtttgcttttcccctaggtccctgagctatctagtctcacatgtttgtttccccaaatgtccggtatggtttccatcttatggagtgtgccctaagtcaaataagatgttggttgcttactcccacaagctttgtgccactattgccctagcatatcttgcagacaggatagcattgtagataaaaaggtttgagggtgggtttgtatttatgtttctcctttgggagtatgcagactaccttcctgtaccaaagactctaaaatataggagtgaaggctctaagtagagaccaactcaacatctctatacttaatgagttgtgtaggtgttgtctttagtaatggggacttgccatccgtttgtacagagtaattggtagttttggcaatagcctgggttgtttagggattcccctgggatcactttggccaacaactcaattaggtgtaacccaatctcggtaccagaaactccatttgtgatggccagttgaggtttgtctcctccattatttgacagtttcatttagataggcgtataatatatgtgtatatatgtatgtatatatatatatatatatatatatatatatatatatatatatatatataaaatttcttatattatatatatatggaagctactactgtgtttggtttccataatgtaatgcctatttagtggccctttgttttagctgtctctccgtgtattctctccctcatttccctcttccctctccctccttactttatccttccatatcagtcttctgcatccatctagaactatctgttttatttccctctcctaatgagatctatttgtccccctagtcccttagtctatacctaacctatacctaacctcagattgaaacttggctaccactgacttaacagctgatgtccacatataaatgaatgcatgtcatatttgtctttctgggtctggaatatctcacccaggatgattgttttttctggtttcattgaattacttgggaatttcatggtttcgtttctcttcttttcttttccttcctttccctttccctttctttctttctttctttctttctttctttctttctttctttctttctttctttcttttcagtggctaagtaccattcttcttttgtaatgtaaccgattttccttacccattcttctgttgaaggttatttaggtttttcccaattcctggctattgtgagtagaacagcaatgaacatggctgagcaagtgtccttgtgctaggatgaagagtcctttgggtagatgcccaagagtgttatggctggatcttgaggtagatcaattccatcttcctgaggaacagcgatactagcttccatagtgactacaagtttgcagtgccaccagcaatgactgagtgctccccctactctgctgagtgcttcccctactctctgagtgctccccgttaaagaagtgttgcctgtggttttgaccttatactcactaagaaggcagttgccttgttaggaggtcattaagttagatgtaggtattatccgttgtaaatacagatggtaattactctaaatccacaagaattagaagtgatccagaagtgtactgatgttgcttaggctcccctggcctggaagccatataagaaacccaacagctttgaaaactgaagagaaattaaaatttaaaaagttttataaatttaaattatatgtgtgtgtgtcaggtcaggaatgccatggagctcagatgcccttggggttggagttagaggtttttgccatccacctgatgtgggtgctgggaactgagcttggaccctctgaaagggcactaggtatgcttagcctaaccattgaccgtttctctggcccctgagaaatgaactttttaatgcagaaataatttgaaattttatccctggactacagtatccacataaaactgacatggttatatagctacccagttggccagaatattctcccttgtataacattattttatttcctttcagtttgttgtatcaagttgtttgattgttgaacacctttctctaactatgccagcgatgctggtcatatgacatagttgttcatatccacgagggagtcaagtcagattcttttctactaagtcttgctagcagcactgacctaatgccattatttatcaaaattataatgaaggggactagagagaaggtttctcagttaagagcaccagctgctcttacagaagaactgggttcaatcccctgcacccacgtggcagcttacatcttaattccagttacaggggctccaacactctcttctggcttccacagacatacatgctgcccaaacaagtacacacacacaaaacatataagtaaaaattataatggaggaagatattttatttttggatcatggaaaacttctggggtaggaaaggttaggacagacgtgtagcagtcatgacagctgactggcacattagccgtctgtggccttggaaagaggagctctagaaactgggaaaaagatagagataagaagcgccccctgaaatggttttgcctctttcagaattcatatttcctttctcttctgccatgcatagccttctcctcatataacaccaagtgagttacaaatgttaggcccatagttcttcagttgaaagtaggtgtttttaactggctcctttctgagtgtcattaggatgaccttcaactcgctgtgtagcatggttggctttgaactcctgatcctcctgcttccaactcccaactactgggattacaggtgtgcaccaccatgctcagcttaatacagttgtttctaaaagagaaagtatgttctgcttctaagtgatttgtgagtacaaatttggaagttaaatctgaattttatagcatcagcaacataaaagatgagagtactgattgcgaaacagcatgctttgcctttgaatccggccccttccattcatagctgcttgacctgctgcccacattcataaagaagagaggggacttctctgctgctttggttcctatttgcatagtattggctgtgctgagttagttggtggcggagctggaagagcacgtgtagttttcaggttgtccagcgctgagctctggctccagcatccttattgatgaccttgctgggcatcaatgattagtgacaatgagctgccttttcctcttccaaattgcagtgactactgtttgacttaccctagggctttgaaataccaaatgaggtcgttttcataaagtttggaaagtataaaatatacattttgaatattgattctcttcccctcccttttttttttcctgagtggcaaacatacttttccccgggatatgaaaactttatttgtgtcttctttagcagtcaagtaaggatttaagatggaaattatgtttctttagataaattaactttgaagattccttggaaaaacctttatggagaagcagtcgttgccacgctagaaggattatacctgcttgtggtccctggagcaagtatgctgtttacattgtaatcattcagtaacattgcaatgaagtgaaattgttccctgtgaagtattctaatataaggaggaagctagagtgtgtgcaagaaactgatcctgtgtctacagtgtagtgaatgtgcgtgcatttacatatgcacatgtgtgtatcgtcaaatgtttgtgtaccgaatgcttttctgttgttgctgaaattcagtctctttttaagcttatcctcccacgaataatggaggtagagagatactactttgtatctgaagcttttttttaaaagttgagatgcacttgacagatgtactattgaagaatgaactgaagtaagaaatttaaaaatctaccaatacattaatttacatatttcaagactagaaacttttcccacattttcttgcctctgattttaaacaagtgttctttcacacaggtataacaggtagtttcttttttaggaatcacagtattttagtaataatcagtatcttgaaatactgaagcttaatatctttagttattagtgttttcagctaaaatgtacaatatgagaacaatttgaatgttttcccaaccgtaacgcagatatcctgtttattttcatctcgcctgcatcactatctatggcactgggtccttactttccagccaccacattaaatacgtagcattagcttgactttttcatatgtctgtgtcttatggttttcacggtgatagtgaaaagctggaaaggtagcgaatattaactgttttttttattataaaatattatagctatttccttctctatttaaaatcagttttttagttcaccatataaatattgcctttcatcatggcagcttcatatatgtatttcttttaaaatctccttatagatttaacttttctattttcttaacatatattatgagatatgagattacagataaaagtgatgttgtggttattaattattcctaaaatactttgtgaaaacatttttatcaatctacattgactccagatgatgtcaatgtagaggcccagatgaggcctacttgcctgccttcttttcttttcttcttttctttcttgttttttgaggaaggatttctctgtgtagcccttgctgccctggaactcactttgtagactaggctggccttgagcttgaatatttttgaattttattctttcatgctgtgtttatgtctttttttccataagtaaaacaacacgacagagcagatattaactcagaaatgagttgaatttcagttgcactcgagatggggagcctctttctgtggctctggaaacacgagatccacctgcccctgccttcgagtgctgggatcaaaggcatgcaccatcgcacccagcttttatttacttattttaaagatttatttatttatgtgtatttgtgtgtgcctttgtgagtttatgctcaccacgtgtgtacaggttccctggagttgtaagctgcctgatatggatgctgggaactgaacttgggtcctctgcgagagcagcaaaggtgctaaaccactgtgccatagctctagctcccttaaataatttttaaggtactaaacctcttatcaggcagtagcagccagtattctgacatattttctatcttctgcttttctcttttagttatctacccagccttttccatctttcctggctttaactacttccttctaatttctttcttttttcttttgtgaggttaataaaaaaaaataggaatcatatatgtgtaaatgttttgtaggttaatttttgcagaagtggttttttatcttataaaaatgatgttaacatataattaaaataaggttaaagttttctatttgtttgctgatttctttgtgagaattaactgtatgcttttaggtattaagtatgacgctgagaaagaagaaaaatccttgcaggatattaaacagaaagaactttgccgaattgaagaagcccttcagaaagcagcagagaaaggtaagcttattttattaattaagctcactgtaaatacctagacatacctatgttttaggcatatttaatgtcatttcataaggtgtttgtttgtttatttacttatttattgagtcagagtttctgcatgtagccctggctgtcctggaactcactttgtagatcaggctggcctagaactcaaagaaatccacctgcctctgtctctggagtgctggggtaaaagtcgtgtgtcactaccactacccagctttcaagcccagttccaaagaatgaaccttcttttcagatcttaaaatactgtttataaatatttcagtggccaacattgaggatcgattggttttgtctggtgacagttttattttaagttcctgaaggcaactgtgttttgaatgacattgaggtgtgtaatttgtgtgtgttcatttacacattttgtatgtgttcactacaaacacctgtgtatttgtatgatgacagggttaaggtgtcacagtaggaggagtattgctatgtacaaggctttgctgctggtattctgtttccatctcttcatgagagaaaggattttcaaaacaaggttttctgcaggcttcaacatttcaacactctcaataatttctctctctctctctttttttttggtcagataaatttgataattacagtacattttgattttgactttgatttctagagctagggtgggatgaaatgaaagcattattagtctgtagagtcatgagtgaaggactcttctagattccagtcagtttatctctataaaattaaaccatatcctgtttctgaccgagacacaatttatcagtattttgtatcatttttgaatcatttggtggtgtgtatatgaatttcaatgacgaaggcaggtagtttcttattacatatttttgaattttattctttcatgctgtgtttatgtctttttttctacaagtaaaacaacaagacaaagcagatattaacttagaagtgagttgaatttcagttgcactcgagatggggagcctctttctgtggctctggaaacacgagccagtgaggagtctattttacaatgacttcttgagctgagtgtggttgtttaactctggccgctctggaggttgatgtgggagatgccatggcccagtagtgtgagcaacatcggagactcttctcaaacaacagcctcagaaacagtatctgctcttggggtttccacatcactgaccataattcctcttttccaagtaggtttttcctttgtagaaatgttgattctttactagaagttactaatgccagtcttaatacagaggctatcaaaatggaagaaaatatgtgaaagcctaagagtttttccccttttctcctttacactttaataaagcatgatgaggggttctgatggcagtccagtagtgtctatggtttctaagaaaaaaaatccattttgcttcattagcgtatgtagaagtagttcaataaaaaatgaggtgtgtcacttggacactagtgggacttcatttctttctatataattccaagttagtttattttcttaatttacacacacacacacacacacacacacacacacacacacacacacatacacacacgcacacgcacgcacgcgcacacacacacgtacaccagtgcacatacatgcacataaatgtgcatatacatgtacacacatatattcatctaggcataatggcatatttaggtatagtgatacataactatacatttataatcagtcacatatataattaatattttacctttgtgaagtctccaactcactgtttttcaaggattaatttaagagcttaaaaagtaactaagtgttttcagtgctctataagaaaggtgtgatctggtctgttttagtagttgatggttcaattggcataataagtcagctcttcgctgatgtgtttgtgtctggtggagactcgtgctttctctatggagggtgaacacctatggagcctgtcctgtgttaggcctgttaggcctgtgcagtaggaaatgcaaacatggcagcttcttgggtgatgagttttcagatttgtcagaatgtatttaaaaatcagaaggtgaaattcagcttcaggtactgggttctgaatgtaacatagattaatttaggaactgaggaatatgatgagagattattttcctataactgaagaaaactggtttatcattttgaccatgtttataaatattctttcctagtttctgttggatatgcatcatcttcttgtgagctttttatctgagtgataaacatcctttaaatcagtggttctcaaccttcctaacactgtgaccttatgacatgggtgacctcttacaatagagttatttcattgttgcttcacagttgtaattttgctgtggttatgaactgtgatataaatatctgatatattgaatatttgttatttgatacctgaggggattgtgaccattggttaactgcttctcatcttaccatattcattaatagttactacattattatcgcactttcttcagacttgctttcccagtctttcttgattttaaagtctggggtaccattgcctgtgtagggactcggggagataacgagtggggatgctctggcctgcatgggcagataaatacaagcgaagataaaaccttcatgtcgatttattctaaaacacatagcttccttaaaatgctgttactggctgggcagtggtggtgcactcctttaatcccagcacttgggaggcagaggcaggcggatttctgagtttgaggccatcctggtgtacaaagtagaaagtataaagggtgatagatgagttccgggacagccagggctatacagaaaaaccctgtctcgaaaaaccaaaaaaaaaaaaatgctgttactgttgtttggaacaaaaatctgaagttttttatttcaattttatagaatttgcttagctataaagataagcttttttttttcccttttatttctctggagtggctttctgtacttgggaagccatcatatacagcttctcctatgttagcttccacatttaaaatgttaattttgcaaggtaatatatacatacacttaacaatcaaatggcccccataacacttagggtgataggtggcagtcccctgtgcacactctgctgtccttcataccctgttcttttaagccaggttatgatttaggagtctcagtgctgttcttttctggttcattaacgtctgccattgttgtttcttttcaccccaaccccctgccttgtgttgacacgagtccaaaggccacagagacatgcccttgcatttttgcgaagtctgaatgggtcataattttaggccagttacctcctatgacaaggtaattgttcagtagaaaggtctactgacagactacgattatacttccttctagaggtcttgtttttcttgacttgtaaacattccctttcattctttgtttaatctgctgtgaaatgcactaagtttgacacatatgacttggtggttttccaggtgttttccaactgctttaattcctgttttggttctctctacatatgccttattatttttttcttggagttttctttctgaattctttttttcccctctagtttatttcagtgctgcataaatgagcctcgtttcctcaccaggcaggagctctactactgagcttcactttcggtgcctgtgtagtttaaaattcacttagggtttgggtctgcacacgtagtcttgctgagcctgtcctgttacttctctgctgagttagcgcctccatggctccatggctgccttgcctgttcttttgtttcctcctgtgtttgctgggcacatctactagctctcagtgtgactgaaatttcgctcaaggctgaatgctagatttcttttttcccctgggcttagaatatcacattcaagatcctggaagtggtagttcatactaacaggaggatggggcaggagaggttgactatagaactgtttcaaaacagacacacactacacacagacacacagtccccccacccccccccaagaaacccccagccttccagacctaccggaccaaacaacaattaaaaactcaaaacacagtattaaggaggttgagaattcagctgttgcatgctgtgtctgctagcttctgggtgattttgaggcactatgctcttatatgttgctgaaaatggaactctgatatcaggcaatttgaattgggcaagaaggtgtttgttcaatgatgaacaggagaaagtgctaagtctcatcaacaatgcacaggtagagtgctaggagacttcagaatgggatgacactgttaagttgtgcagatcagtgtgttctgtgaacatggaagagagaaggaaagagttctccaggtcggggaggcagggtagacagggtagaaaaacccagagcacatgtggggaacagctggaagttaaggggagagagagagagacagacagacagacagacacagagacacacagagagagtgaaagatggagagacagagagacagagagatagagagacagagagacagagagagagattggttgcatgtacggttgggaaactaggtgagattactttaaagagatttgaatgaccgggcgatgaggtcaaggaccacgtttgccagtgcaaaggtgaactttagcctccagcggctgaggagggggagttcataacctttctttgaagtctgaagttgcagtctgggctgggcttccttagggagagaagtgggagagggagttgtctagccatattgactcgagtgagtaaagtctgcgggcagcttgtctgcaaggaacaagttacacagtgaactaagaggagactttctcatctgactttaaagttagtggcacgcatcatgggaacataatgaaagtgggccacaggacaggcaggaggagaacccagatggcagatttgtgttgtgtttgaaaattcgagatgacactgagacccaagccgtcaatgctctttacctgccttgcccaatttgattgttacaactttcacaatgggagttttgtttgaatataaaaggaaggtttatatgttgaaagaatgtttccttggggaagatggttttatgcccctgcctcttcacatgtcctgcaatgtggtttctgagtttttgaagctaagtttgggtgcatttcccatgcaaaactaaaggtgtcttaccatgctttgcgttttggttcctgctgccgtgggatgcaggtgcacactcaggggagttcatgtatggcttggaaaacttgctttacaaggacgtcaagcctggtgggtatgcatggttaattttacttaacttcatgaaactgatattcttatttatgtctgagctttgagtggagtccactgcatagtgtgcgtcctttgggaaatatggaaatgtaattcacattcatacccttgccatctcttcctttttccaccctccgcagccattcattcattcactgagtctttgagtgtctcctggaaaactctgtgctgggagcttgctgtttgtgagtgagccagcacagttcactgcccctgtagaattctcagctctgccagcgactgggaaatgcgcactgccctccctttggccttagtttttagtacagtaatagtgtttcccaactgagggctttctcttgcttacagcagagagtttcaaatctgcaagaagcagtaagatggaatatatatatataatattatacataatatatattatatatgtatatatgtatacatatatgtatacatatataagtatacatatatacacacatatatgtgtatatatatatatatatatatatatatatatatgtgtgtatgtgtgtgtgtgtatatttaatacttcatccatagcctcaaggaggaactcctgcgttccctctcctgtcctcctgactgtacaatcttctctagtctgttgtcctgtatagctgaaacccgaagcttcacaaaagcaaactgaaggctgtttgctgtaggatttagaatggaaatcttaagtacactaggatgtgtaccagatatttagcaacagtttcagtattttaaatgaaatattatatctttataactcttcaggagtttatgttaatttcagcacaatttagatttgctttgactaaatggtaaatgggtctgcagctcaaatttcaaatactgaacgctatggtagaattcctatgcagataattaacttctttaatatatatgtttgatagtgagagaatttgcatggcagtttcacagcataagaacaatttctcattttaaaaatctaggtatggaagttaccatggcggagatttgtaatcagatttgctaatttgttaatttacaaataaaccccagtagtaaccatgattgactgtaatttgctactttacaaatctatcatggtagtaatcatgactgactgctaaatttgtttctatacagatctaccactgtagtagccatggctgactgctaatttgttattttgttcaataggaggatagcacggagaattttagggcccattgtgcagttttataggctgcaatgaaccggctgtcttctggcccttctaggaagagtctgcctggaagctataatgaatgctggtgacctatcctcatgccttacacagccactggccttgtgaaagccagcagaaggcacagtgaggaaagccttagctgactcattacctttcttcctctagactttagagtaatcctggtgaagtgaggctctcagtgcagtgacaagattcctttgatgatggcatcgtccttcccgtagctggcagcgcgtgctcttcaggacactttcccctttcagtttttcagtgcatattcatgtcattttttttaaacattagagtatcaattctcagaaaggcagggctattagagctattttcatggtgatatttccactgagttgatttgtatgctggtagaagtaatggcttgttacagtggctgtcatggcctgattcaaggaaggacagctcactggaccaccggtcactgtgttctttgctactgtgcactcattacaaaagcaaaagcaaatcaaatgtgccagtgtttcttaaagttttttcttgacaaaatagaatttaaatttaaaaggacactaactcttgagcaggtctctaaaatgttgtgggacacacaggagagagtgtgtgtgaagcatttctgaatgctgaggtagctgattctcagggatgattgttcatgcagatgtgtgaactgtgtgaacttgcttcttagggacaaaggctgtttttactcgaaagattgacagattctcatcattcaagtttgagtgtgtagcgactatacaaaccaaagtaagagtgaactgtcatatttgagtaggaacacttggtgcttttaaggaaacattagaatgttaagaaccccttagttgccaccgtcgagcttgagagccacctagtatgcccagacattcccgggagcctggggtgattgcagctaattcgcctcttgtgttaaacactgcaggatggagcatgaggaggctctgcctcactcactgcagcatgatttccatatgcccaaggattggagagccatggctgtctgaaaggcccatgtcacatgtgcggtggccagctgacttttattggctgactgtaattagatgatagatcttatatataatttaaaaacctaattgagaaactctatttactaagcttgaatgcattcctcataattacacaagaccatgcaaactctcttcctttttccagttgcatatctgctttgaaatcatatttgcatcatgtacttcaatcagaacaacatatctcagcagattgaaggcagaagcagatatgtgaatcttgccatcttccactaaacctgatattaaaggcttccactaaagccagatattacatttgtacaaatgtaaaatcatgtgattcttctcactgtgaatataatatatatacacatatatgtatatatattatatgtatacgtagtacataactataatcaagtgatagtttaatattatgttgaatgaattaaaaatagttttttatttctagcatcataaatatgaataataatagcctatattacttaaaatctcttcaaattgctcatgctttaaatgtgagtttaaagggtcttgagaccaaaattttgagaactgtttttagagtatttgagaatcagaaatttattcttcgttagattaaataaggattttctttcaaaattgtgtagcttttttgtagagctaagatggtttttaggagggctgacgtggggcctcccacactgacattaaagatagaacaggggctagagcacttgggaactcgagagacagtggtcagggcgggaggctccagccaagtgcagtgcctctcttaccttctccacgtggtgtttctttgagaacgcagtcttctgtatgcttgatttatggagttggaacgctagtggctgcgccattcagcttctgtcctgtgtgtaagggacttcttctgaaaaatcagtttattcttgtaattctagctcttgtcttaattttatggtagagcaatttgcaaatatcaacaaaataaaatagaacttgcagctatatacagtatattccggtcgtatttttgtattttgttataatgtttatgtgtggatgtttcagttcgtgtgaacagcatatattatgtacctgtgcgtagatacggatctctgtccttggaagtctcttgctggatgggagcctcttgcccattggcacaaaaatcaggcaaacagttcagatacagagctcttgttatttattagaattttgggtaaggttcaggtcccgaggctgcacagagctgtggaaagtttcatacagggggtgagtcatacagcaggagggttggacacgagacagcaacacctaaaagttggctccgtaaagaatttgaggacggcagcctgattgcagagtggtgtgtagggaggcggtagcatcggcatgagtgtgttttggaaattacaaacaacagttctgcagtttcccacgtgggtggctggcacgcgtggcaaaggcccggcctgtgtcatgcacactcgttcgattttatttgtcaggctgcagagagcctttacctgacttggaactgacaggctcaactagtatattagatgcagtagcagtgcagaaggtcctttcagcagaaggggaggatggggacagagtcaggagactacccagaattgcctctggaggtcaggtcacggctgatgcccggctgtcagttgatcagaacactcgaaggttgggtaagaaaggtgttggctaatgtgagaaagccagataaggagggtacaatttagaggaaccactgctagctgaacgtactggttagtgtacgctttataccctcctactttcatgagctctacctcatgcttgagcaattttgtttgtgaagatcatcatctagagaggccatggccctcaacccaatgccatcccatttgtattcctgtgcccctgccgcacattgctcaaaacctttcccggaaggctttatatcattatcattacatttccaatatttggttacattgaatttaaagtgacactgtaatgtgtagttattaatattgaaactccattgggaatggatacattttatccatattttatgcaattgtacctgccaagttattctctaggataaaagttgttctttactgcagaatgttgatatagtaaagaaagcttgtgagtttgtatttattgttgaagtagtaggtcagtgagtgtggagggaggtaagtctcgctgagctttgatgtcaggaagaattctcatattttcttttctgtcctcttgtctgctaacttgacttttatccttttctcactaaaatgcttccactgagaaggacgtaagcgtaaaaagcacaaaaaacattttaagaaacgttttaaaggtcttgatcgctccaaaggtaggtacaagcagttctctacctgtgctgtttatacaccttgatttctgtctaagaaggtaaaatgaacattagtgtgcagcttaaacataaaactaaactttaagctggaactatttgccagattctaaaataaatctaaggaccatagcatacgttgtaatttccgttgtgtagtgcctttagcgctctttgaccatcggtcgtgaggtgtgtaagatctgcaagtcttgagctcctgtttttctttgtcatagataagcccaaagaagcaaaaaaggatacatttctggaaaaatggcaactcaagtaataaaaaatgttcaagtaaaattacagacattcannnnnnnnnnnnnnnnnnnntgatgtaagtaatttcagtattttgctggtcattgaatgtgttttatgacattctgtatcttatgatgttccatctatagattaactgaacctaatttaaatttaggatagccacccctgtaaatatgctagtgttccacccttcccactcagcagtgctggccaggccatgcatacataaacagagtggaaaaccgctgcaggggttgactgttctctgtgctttatttggattttgttgtatgtgctctgatgtaactttaagaaactaatttcatttatattgtcaaaacaattagttgtgaaaggtgatggagtaacttttggtattgacagtcagcaggcagggcctctggtcagtgtagttacagcctcttaccagcccctgagggggcttggacggctcagaagcacccacactggggttagaagctgatcttgggggaggccaacttggatttccatgttaatttgccttaagtttgactagattagaagactattgatggacaggattttatttccccttcctgggtgctttgtgtgacagtattcaatgagatgcatatgtagtctgagagagagaaaacaaacaaacaaacaaacaagcaaaccactctgctgcttactttatctcttggctttctggaggtattaaagtaaactttgctaaccaagatactttgtatcttgctgtagcaagtcaggaaaaatgtacccagtatattatggaaatgagttattgttaaagctgtgtggaaaaatggggcacttctctactgtggctgcaaatgcaaatgattagaactggttttgaaagcagattaagagtaccagaaggcccaacaactgatttctaggtataaagctgaatacattgaatgaagcatcttgaagagacacctgcaggtttgtttacaataacttaggtacagaggcagctgaaattcagtggacagatgaatgcctagcaaaaatactgtacatttccacagtgaaatactgttaggcctgaaaacaggcagttctgtcattcacagcaacatggctggaactggtgattatcataaagtgaaatacactacttatacagagacaaatactgcatgatctcacatatctctatatctatatctctatatctatctatctatatctatatctgtatatatatctgagtatgagaattataggtgtgcaccaccatggctgtctccattatacatttatataaattaaatacttatatgtattaattacaaataaagtcttgaagctgtttgtgctttccagctaccccagagcatatatacacgtttcctgtttgataagggtctgtctgacaagactgtggcgttccatttggatgctgtagaacacatttacaatttattttgtcgtagttcatacctccatcacaagcacatggttgcccatggctttcgagcatccttcaatggtcacagacagacatcatgctcattgtgatacaggctgaacaccattcatttataactatcacgtatcaaagttcagaaatagaaaagcagtccctccgtggtaggtttgggataaatagacttggtcaagtaaatattaagattctaaagcgtggccgcaagaggagggttgaaagttcaagaccaggctggatttcaaagtgagatcctgtttcaagaaaaacagaacaacctcagcaaaacacaagacctagagcctttcctcaccagacactcttgaagtgtcaagggaaggaaaaccataaagatgggtcacatttccaaagatggaaaccttaagtgctggggcagtcactaaaagtgctgacgtcattgtttgtggagaacatcacgatacacacaaaggtccatctctttctaaccatctaagcaagagtctgctggtcatagttctgggaaaatagcacattagtggcctaggagctgttgtaacgcttctatggacacacagccatgtcagcacccagctcctgtctttgcaggtcctgggctgtgtgacttcctcttggacatgtgttcaccagctgcctatttattatttttattgtttacattttattttaaatttaaattttttattcttttgagaattgcatatataaatcctgtatttatataatttccaaccctccctgccacactctccagctccttctgtgttccctaaactttgtctcaaaatcatgacctctactttttaaatcattatttttagttacaaaaaaaaaaaaaacaacctctgaatttatttggtgttgtttatatggactgaccacttatgggaatgctgtctgttttaaaggcttcacagtctttcttttcccattaatttatttgttcactttacattcagatcacagtctagcatcacacagcccctacccccatgctctcctccccttctcctctgagaagagtggggagcaacccactgggtaccaacccaccctggcccatacagtcactgcaggactaggcacatcctctcctactgaggcaagacaaggcaaggcgccaccatcttatatttaatgttccctttcttctttggtagatcacggatccagaaaggccgctttcatttggtgtcaccctgagagaatttagtctgttggtaatgttggcttatttcaaacttctgtggaatctgtaaagtattactattctgaaatgaactgagttgactaagacacactgttgctttaaacagcttttgtgtttctgaagaactctcttgctgcacattttctccaagtttgccattttcagtaataattgatatttagtaatatcttgatttttttaaatgcttccacataacaaatgttaaagcattcagaagaaatagatgctgtgtctctgtagtgttctgagcttgtacttggtaatattttctaggatctccagcgagtagagaaagtgtgtgtgtgtgtgtgtgcacgcgcgcgcgtgcagagagagagggagaggagaggaagaagggaaagaagagagagagagagggagagagagaagactgggatgtgttaaattatttatattgattagatattttataatacatatattttctctttagtctcttttaagcaatatagggtatgttagtataggcagagtgtttttttttttttttactcttctaagtaactaagcggtaagaaacatacttggggacatgaagtagcttttaacactcagtagcaaccagagcctgagttcttaagggtagaagaggggtcattgatctggaaaatagccaaatagtagacttcataaacaacaccatacttttgagtgtctaccaagtaaataaaaacaaacaaacaaaaaacaaaaaacctgagagctagcagaccactccacctggtctgtaaggcatgctagtgcaagtggtcttactgtgtgtgagtgcatgctgtgtcctactgtgtgctggtgcctgctgttttgttttcccgtgtagcctttcccttttacagcctggtgattttgctcaggttttagaactcatgcgagggagtggcttgcctttgttgtttgtttttactttcttcttagcatttattaacgccctccctcattctccctgtcttagtgtgacaagatccataacatgttgttatcccaggtactgagctgggcttctagctaagctacacgtaccagctgattcagagagtgtcccttttgtgttttgtgagattgagtctatctcacgtgtgtggctcattgtcctgcttcagctgctgggcctcactgataagaagctgtcaggaagtctgctgcctcttttgtatacacacctttcttccttttgtcttctcagtgacagccttgcttccacattaggtcccccgtgtctacaggtctcattgtctccacattcctgcgttctgtcatcctctcttccagatcagcttttctctttctttatatcgtcctataagcagttaagcacattttgtttttatttttgagaaaaagtcttattatgtatgtatggctgtctggaactcattaagtagactaggctggccttgaactcatggagatcctcctgcctctgcctcttgagtgctggtattaatgctagtcttaaatattcttatctcttcctcacaacaaaacttaaaaaggctctgtttaagtgtccatccccggcctgactctaaccagctcttctccaccctttccttagccaggcttgttgagaactgtctgctttccctgactcccacttagttccttctgactcttcagcttgtgaaatctgtcaggcagtccgtcagcaatgccccctagtggatgttagtacttggccttgtcagccatgccacacacatgttgtgctgacttccacactccctgtgtttccatcctaccttacagcaatttttagttctcagggatgtgtatcttcttcacctgtacataccagctctctgtttttattcctgtctatgacttcagacatatagtaacccaacaataattttctaaatgaaggaaactggttgaaacagagttccttcaaatttaaatttcattgcttctttttgttatatgaatatataaagaaacagcaaactttacctgacactacctaggtaaggtttaaacttaaaaaaaaattattttgtaaatgtgtgtgtgtgtgtgtgtgtgttggagagaggggagggggcatctcttcaccataacacacagtgaaaatcagaccaacttgtaggattctgtttccccttagaccatgtgggtcctggggttgaattcaagttgttagatttggtggcaaatgattttacccattcagccatctggctggacacttttctttctaaattatttgattattacttacagatactaaagtgtgtatgacacatactgctttgtaagagttgaccttcttttctttttagacaactaatgaacactggactccatgcattttaaatgaagcagaaaaaattatatataaggtattatatttttcatatacatggttctagaatttcttggtggggatcaatttttgtgctcgtgtggataagatcttttagaacagaagtatctgttggtaggagagaacagcattgtcagcatccagccatcggggccagcttggagaggtgtctcatttcactctgcccccaaagtacaatcatttagtcatttcaatgcaaactttgcaaaagtgttcagtacattttgggggtagatcaaaagtaacatctaagccttcaggaactttgggaaggcatgggagtaaatataagcatatttgatttctagtaaaagatccaactcttaggaactacttctggtcatataaaatgctggtatttagaggaaacgtcacaatctttgtatattataaaattagcaagtgtcatgccagggaatattgtatgcacagttgggggcatcctgataatatcttttagtatggtaataacttatttttaacattttaaagttaaaaattgagatgtctttggacatttaatgtatttatggaataagttttgattgattctaaattttagccaatcaggattcgtagtgatctgtatacaaccacttgagtttaagagtctgtattttaaataggctgtcaatcaatttgttaaataacctatttctgaattttaaactaatactcgttgcctttgacagacttaggtatttcatactgattgagagtttaacactctccctcataaagcacaaacaaataaaacatgttgagtgtcagaggtattttaatagggttgacgtgttccttggcaaagttagctcattagggaaaatgtgtttaatatgggtgactaagtgagcctaaaatgccttgaactttaaggacttatgttgcctttgtagtttgttaataaagatgagtcaggcatggaagagtccgagatctggtttggagccagtgtttgtcgtatgagactctgtgatcacttatttgcgctgcagtttaggttcatccatcaagtgaagggtctggacacaagcaacctcccaggtggtaggtcatgtaagactagccagatgaggtcgtagatgcagaaagcgtaacttgtggtgtggttaagctgcacaccatgcatacccgagcaggcatgtgctgtgtttaactgcggggcttgtcagggcttgccgtggttcctcagcatgcttgctccccagcacctccaccattgcagtctgtagctctcccagcttcgctgcccataaggtccttcccacagccctcctcagcgcagccccgataactgctgcagggagcttggatttccttatcaggcaaacagtctgctagatgctaaatttttactatttgataattgaacgaatgtgaatttcctgaaactgtgttcccagaaacacgtttaaaagaatgtttctcttatcggaacattcaatctatatgaaatacctaagtctgtcaaaggcaacaagagttattttaaaattcagaaatagtctatttaacaaattgattaagacagccaatttaaaatataacatttgctcttttaaattcaagagtagtcataggtagatcacccagaatcctgattggctaaaatttaaaatcaaacaacattaaaaaaattaacaaatgctaaacttaaaagtcctttgtatacactccccttcatttttggctattttctttcctttaacgttcagatttttagtgagctggagggtagtgttgactgctgttgcacagttttagggtgctctagaggcctgaccacttccatttcttttgcatagctcgtgaagctggacagtctcagcgcctattggaacgttggctgctgcatgtcttaccgtggatcgagggagcacatcttggtaatttccatttttaccttgatgtgctgactgtgtgccctaagtgtgtttaaaaggggggggggcttagtgagggcaggctgcagacatttggttaactggcagatcactaaatcagaagtctgaaacaacatttgaacttagtccgtctcttcagaggagccctctgataattcgttctgaaaccgttcccctggcggtgacagggagcctgttgcagcgccccctgtggttgttcatgcacagtttgtggtgctcttacgatgctgtttcctgtaagaaggagtacgagtattgtgaggatgccacccctcagacctggagctcatgcgtcttacaagtcttcaaatggctgtggtgatgatttcctgcatggtggcccagtgtactgagccagtgtctcatttcttcagttagaaaagggaggcagaacagccgcactctctggattagataagcgttcagattctaggaactctaacagagactcagtctttgtctaggatgtcgtagatatttaactgtctctgggtggctttcatagagaggagtgtgatattatgctcctagatattcaggtcattgtgtgtttattataaagaaaaatacctgtacatttatactgtctaaacctccccccacagggggtggggggaagaagctgggcaggcaacctttaatcccagcactcgggaggcagaggcaggcgaatttctgagttcaaggccagcctgggtctacagagtgagttccaggactgtatatttttctcatgatagttattagtaagagaacaatgaaggtacagatgtgagaaccttttttttttctttttttttttttttttttaatttttggtacttgtggctaactgtctttgtctttcattctcaactttaaatctcttcaggagcaactgaaacgtgaaattcttacaagtacaaacatccccccagaccatcagtacagtgagtaccagggagagttcatttatggaagagacatggagacagacgtttcttaatgaagttactttagcagacagaatgtgttaattttatggtacttggccacacatgcatatttggatggtaactcctcaggactagacctagccacaaagtgctggagaaagatgggggaggcagaggagctgggctcacgcctgtagccagcctccttttgacctccccttctgttaccttgttacagttctttgtcttgtggtttggctcctccctcccttctctccctttaccttcctcctcttctttttttccttctttctctccctagttttggaatctctggggttgtggtgttcatctcacctctagcagtgtaagacaatcacgctggatattttttaaagtgaagtttgtaattttttggcagcctctcctttgtttctctgacagagcttcctgcttatctctttcatcctgagaagctattagtttgctgtcattcagtgaacttctttataatcatccttaacttccatgtccatttctttccacattccggttgtcctggttctctaagctttccctcctgtccttcgtagctcatcgttgtagatgatggtgctttctgttacgttcatccacttgaataatgacagaaatttaaagtttgtaaaaaaatttcagtttcattgattaaaaatagtttagaaaatattcatcttaattcttaggcatttatcaatcacataagtcagtcaaaatattatacaatttattgcaaattatacttataaggtaataaatacacctatctggacttgattctattcatagttataatgtatcactattaccatccctagtagacttttagtttttactgttactcaaccttaaagtgtttatagtttttctcatgttgtttgtatatgatgaacttgaaaacagtatactggtcatttgtttcctaggatgattttatttgtttctaaattttgtcaattattaagaaaaaatagattttatttctcctattttaatattttaaatgaataataaagtattaaatcatagagaaacccagctgcagacaggaactgtgttctgtattctccttacttgggagcccatgactcccaggaaaccatggagagtgggtttaactagcaagctacctaacttgctagatccttatatatcactttctcttgcacacgcacccccccctccccgtgcagttccccccccccccgtgcagtcccccccccaatctgtttctctttttnnnnnnnnnnnnnnnnnnnntgggagctcatgtccacttccccctctcagtactgggaccccatctggcttgaacctgtgcaggtcctgtgtgtgctgtcttcatttatgtgaggccttgcatatttcttgttagtgattttattacatattcatagcatcttttacctttttactttcagtgtataatattctcataattatttatagttgttcatagttaagtacatgtaagcctattttccatctttccacatgatgccagttttccagccaatatcagcctctgcaaaactctacatgaatcctggtgcagaatcagagctcaaaacccccaaactcgatgggaacgtagaggtgcagaatattgccatcgagctgacgaagcctcaggtaaggctcccgtgggcagctctggtgtaatcagccctgcgttctgatcgctcttgtgcttgtcattagtcgttgtctgtagtgtggtggtacctttgtttctttctgttgacatttgatggaaaaaaaaaaaggaaagattaaaaaaagagatttcagacaaatagtttccattaatctgatctttccccccaaactatacttgatcttattaaactgtactgaatgatgttattccctttgaaatcataatcgtaggggaattacagtgtgcttttcttctctcattattttttcttctcatcttttagcagtgtgtgtgtgtgtgtgtgtgtgtacatgcatgtgtgcgtgtgtgtggggtcagaggataatgtgaaggattcagttatctccctccaccttgtaggctttcgggattgaactcaggctgttgaacttggtacaagccctgagctacttttccaatttttaacaaccttttttatttgtacttatatatagtgtgtgagcctctgtgaatgcatgggcactcatgcttgcaggagcctaagaagatgaggtgagggtatgaggtcccaggaactgaagttattgggggctgtgagctgccacatggtgctggaatcaaacccaggccctttgcatcagcagcccctgctcctaaccactgagccatctctccaaccctgtcaccttcgtttttaatagcaaacactcaagtaccattcctttaattttttagagcaagtgtttttcctctctctgttttccaagtgtggccatatgcacagaggctttggatagcagagctggagacctgagctgagaggatgggacctgggcttttagtttagagttgtctaataaagagtgtgaaaggcctttaccattgtagattttctagtagctacatcaccaaagagggaagtatctgcgcttctgtttagtcttgcgtggtctagaactcactatattgctcaggatgggtttgaatttgccgcaaccctcctgtctcatgctaggtctatagatgtgtaccaccatgcctagctcaaaacaaaccttaataatctattttacttaacataatgtttctacaatgttatttatttatttattttgggtttttcgagacagggtttctctgtatagtcctggctgtcctggaactcactctatagaccaggctggcctcgaactcagaaattcgcctgcctctgcctcctgagtgctgggattaaaggcgtgggccaccacaccggcctacaatgttatttttaacattgtgaatataaggtgtaactagtattttgtatcctttctcccttatatctttgaaatcggtgatagagtttatttttgcagtttaggctacatacatttgtctagtaacctttagatagaattacattaaggaggattcaaaggaagctagccctttgtctagcagagcctgtgattgttgccctcctcttcttgtgtgtttctctttatttgaactgtttgtcaggcctgtataacataaagttgtgttggtagtaaagtggatgcttcaatagcttcggcttgcttagttaggcctcagttttctgtagcagtttgggaattagctactgtagctgtggcaaaaaaaaaccccaaaaaaaccaaacaaacaaacaaaaaaaaaaacaaaaaacaagggtccagaggaaaagcaggcaggctcagaaacacaaatacaatcgacactgggagacataccattttattatttccaagatacatattttttccactttagaatttgaaaaaaggatgtgtattactggttgtgtgacagtttaaaaagaacttaaagtatcttgcttaattggtaatgtcatgtttaatcaggtatagttagtatattactgaattatcagagatttttggagtcctctagaaaaagagaatctcatttttatttatatgttcactgtaacaaacctaattttgttcttgtcttaatagtatttaagcatgattgactttttggagtcactggattatatggttagaaatgcaccatacaggaagtacaaaccttgcttgccacttcacaccaactgtcggcaatggtaagttagaaccactaccccctcttttgtatgaagatgcgcttgcctgtgtgagtatgtatggagagtagagatggatgttgtctgtcttccccgattgcttctctcatccctgctttctgagacaaagtctctcattgaccctggccacctcccatcacccagcactggggctgcagcagctgtggcccagggagccctacgtttacacgcattctggggatgcacctcaggttcttgtgttgttcatctagcgagcgagcgcttgagcacggagtcatcgccttccttttgttcttttgttttcaagagatgaataatcgtatagtcagggccttcagagttaaggaaggtttacggtcttactgtttagacacttcaaaaacaataagaaaagagagacctttttctgtctgcgctggtttcccccaccctcactaatgcctcatttgatattctgcttctgaactcctgaagtttatcttagcagtcaagacttcgaacatgtttttaaaagtcttgtcagttttccacatggactcaaggttataggaatacagcctgtagccatatttcacttagcaggggaggtgtgtgtgtgtgtgtgtgtgtgtgtgtgtgtgtgtgtgtgtgagaaatgcatttcaggattgtgtgggtatcatgctgtgggaactaaaatagctatgccatcacgagataatataactcagtgcagccattgtgctggatgtggtctgccacttaagaagaagttgctgttaagcacaggactgctgttttccacatgcatcactttgtgccgttgtggttttgcttcagcatatcttcctcctggagtgttcctttgctttctctatttaggccagggagttgtactggtgactcgcagtgttactgtagatggtaaagaacaacagcagcaacaacaacaaaatcaatggtgtggtatctctgagaagtctaaactgttttcttgcatttttatattcacatgtacattaacaaaatctgacttcaggtggaaatatgctattgannnnnnnnnnnnnnnnnnnnnnnnnnnnnnnnnnnnnnnnnnnnnnnnnnnnnnnnnnnnnnnnnnnnnnnnnnnnnnnnnnnnnnnnnnnnnnnnnnnnnnnnnnnnnnnnnnnnnnnnnnnnnnnnnnnnnnnnnnnnnnnnnnnnnnnnnnnnnnnnnnnnnnnnnnnnnnnnnnnnnnnnnnnnnnnnnnnnnnnnnnnnnnnnnnnnnnnnnnnnnnnnnnnnnnnnnnnnnnnnnnnnnnnnnnnnnnnnnnnnnnnnnnnnnnnnnnnnnnnnnnnnnnnnnnnnnnnnnnnnnnnnnnnnnnnnnnnnnnnnnnnnnnnnnnnnnnnnnnnnnnnnnnnnnnnnnnnnnnnnnnnnnnnnnnnnnnnnnnnnnnnnnnnnnnnnnnnnnnnnnnnnnnnnnnnnnnnnnnnnnnnnnnnnnnnnnnnnnnnnnnnnnnnnnnnnnnnnnnnnnnnnnnnnnnnnnnnnnnnnnnnnnnnnnnnnnnnnnnnnnnnnnnnnnnnnnnnnnnnnnnnnnnnnnnnnnnnnnnnnnnnnnnnnnnnnnnnnnnnnnnnnnnnnnnnnnnnnnnnnnnnnnnnnnnnnnnnnnnnnnnnnnnnnnnnnnnnnnnnnnnnnnnnnnnnnnnnnnnnnnnnnnnnnnnnnnnnnnnnnnnnnnnnnnnnnnnnnnnnnnnnnnnnnnnnnnnnnnnnnnnnnnnnnnnnnnnnnnnnnnnnnnnnnnnnnnnnnnnnnnnnnnnnnnnnnnnnnnnnnnnnnnnnnnnnnnnnnnnnnnnnnnnnnnnnnnnnnnnnctgacagctgtatgaacaaattcacgagggttcagatcatctgattaatgttagagtctcagtttctcctgtagtctacttggtgacttgagtaatttacattctttttttttaaagtaattaatgatacaatatctataaaataatacagaagaggggagagtaaaaactaaggatcacaagaaaatagctgaagctgctctccagtttttattcttctttaaattttatgcctttaagattatgtgtatacgcatgtttctctgtgtgtttgtacaaatgtgtacaggtactggaggaggccagaagggggcatcagatgcccttgagctggacttataggtagctgggagctgccagatataggtgctggggactgagctccagtctttgcagggtatctactgatgttttccagcacttctttagctctgcacactctctccttaaacaaacaaacaaacaaacagcaaaaaacaactttaaaaagatgtatttatgtccgtagtgcagcggctgggagcagtgacagtaatctgtgcccactgcttccttagcacactgccaggggtggtactgcctagatgactgtatcagtatagttttatataatcctctttttttcttttgttttgcaggacttggagaagagtctagatgtttttaacataattttagtgagacaacaagcacaagttgaggtaatcattttgcctaacggactttattctttattcatcaagttaatgccacttctttaaaccgcggatgaagaaatccggtcttatgagaagttgctaagatttacccaaatgagaatagggatgggtccttattgtttcattttgtgtctagggaaaactaactgaaaaaaagctgttaacatgagaaggaagagctttaaaactatgtaatcaaaactttgtaacatagttaagtctaagttcctcgtcattctaacagtccggaactgtcagttaaccttcagcatcaggcacgtgctattccttatgacttagcaaaaacttaatgaatttctgttattcttgattctggttaagtgtgtggacttgaggttcagatggtccaaaatttgcagacttttggttttatgacttggcactagctatgtattctctttgtgctttggttttctcctttatataatgtaacctgtatcttgtgtttattgtaggggaatatgtgataaatcatttaaaacactttgttgtgggcctggcccttaggaatgactatgcaagtgatttttttcatctttctctttgtcattggttttagcatatggaagagagcaaaataaagaaatcccttccaaagggacagaaggaattaaacatgaacagcagggatatagagggctttggctaggccgtgatgatcactgggactgtaggtttaacaaggagggcagagaaagcttcactcagaaggattgggcccaaggaggttgagagagacaccagaaagatgtgcaagggcagagctgactcaggaggaaggaatggaccagttgaaggcttttggcctggggagggtggcagccactgtggtttacaggaagtggcagggtggagtggaagtggggctgctgggagtctggcaggtcaccaggctggtgtgggatcttagaagcagctgtggattttggcttgaattggcaagtcgttaatattgaatttgagaaacaggatgttatcattggggatgctttagaacgtcttgctgctttgcaaacagctctaggggagaacaggaggatcctaaaagggaggccaattgctactgagctatcagacgaggggtggcagggcaatgagtaggtatttaatctcactgaggggtttctactccacctttgatcattcagttcccagataaaagacacacaacctttatatttataataaaccttaatcagtattagagtggggcagatacctgccctatgtgctataatgtttacattcctaccaataaccctgagatacgacttgccattttctgcatgggccactcttattccagttggctagtccacaaggccagtacttacagtccgttactccatggcatcttctcttctctccttcttctactttccccttcttcttggtcctacctcagttagcaagcctgggaactgaaaccccacctacctctcttctgcccagctttaggctgtcaccgtctttattcaaccaatagctgtacattaaggagcaaggtatgcatggcagtcaagcctttgggggagggggaggtggtatttagcattataatacctagcaaaagaccatacctcaacaggggaggagcttggtttcagtggaggggatggaatgtgccagagtctaggtgtttgaaggcagaacccatattacctgatacagactagagataagagagttaaaaaaccttgggttattttggtatcgaccattcagaggctgactctcctggggatccatcccatatacaatcactaaacccagacactgttgtggatgccaacaagtgcttgctgacaggagcctgatatagctctctcctgagaggctctgccagtgcctgacaaatacagaagtggatgctcactgtgacccattggactgagtgagcatagggtcctcaatgaaagagctagagaaaggcctaaggagatgaaggggtttgcagccccataagaggaacaacaatatgaactaaccagtacccccagagctcccagggactaagacaccaaccaaagagcacacatggtaggactcacagctccagctgcatatgcagcagaggatggcctagttggacatcagtggttgtggtggtggtggtggtggggagaggccctttgaaggcctctatgccccagagtgggggaatgccagggccaggaagagggagtgggtgggttggcgagcagggagaggggggaggaaatagggggagggtgttttttcggagtggaaaccaggaagggggataacatttgaattataaataaagaaaatatccaataataataaaaaaaagtatagatctgtcatcaaacaaatggagaagattgggtggaacaacctgggtgcaaggtgagtagatacaacaatgtgaactcagagttcagaagtctgctgcatgtataaattcaggatggcttagaagtgtgagtctggataaagtcacctaaggagtgagggaagagaccataagccttctgatgtcctgcttagagagatgggaaacaactcagaagtgaccatgggtgttgctgagttgaaggagggaagttttattaacacagttccaaattcaggcagaaaagggcttctaggcagagaacactctgaccccttatggctacctgtgatagacacgcctgagtggccgctgagtgactcagagatgtaagccgacacgtgtgggtgtggaatgctttcacatagtatttcttccttctcttctctttgaatgactgatgcctgtctctctctttctctgtctatacacaagcacacacatgtaaacatctatgtaaaataaacactcagagtgtatatatgtacatatatgttaatgctagaatgaaaataccacatttaatatatcttcatatcttttcctgtctattccatatctcttaactcttgagtgcttgcactcacgggcgacttgggacagacactgggcattttctctgtgcttagccttatgttcggtcatcaaatgtcctctttcattttagaacttacttattcccctttaacttctcttttggattgttttactttttattatgggatacttaaatatgttaatgatttactatcccttgaaaattctcttaaaagtgaatttggaaattgttgaagatcagagaatgatggtagagtctaaatcacgcactctgaagaagtnnnnnnnnnnnnnnnnnnnnggggaggaggaagaggaggaggaagaggagggggagcaccttaggctgtatctgaagcaagaggtgaggggctttgagggctcttcctgtcactgtctctctgtcccaccacgaacagcttagcaaacctataatgcgtgtgaattctgaaacgtgcttcttagaatagtacatttcagatgcagaagcatcttcatcataggaattgttctcaattacaaacccctgatgccagtgcctccttaagtacctgcacattacagtacgcagagaaattcccccacagtctcagttacagctccacagtgtgcctttgttaaattctgttagtaggcgtaggaagtaagccatcctatgaggctcatttcagaaggaaatgattggcctcctccatcaaagcattcggctgatccgaccatacatagacttaacggtgaacagtgtttcttctgaattaatcttcagttttcatttttcaggtcattcattctgggcagaagttaaggaaaaagtctgcggaggcaggagagaaacgtggctggtttagtgggttttggggcaagaaggaatctaagaagagagatgaggagtcttcagtccctgagagtaagtctcagtgcaggagtcattgacctggagggaaagccatgcagattctgccccacgcagccagcacaggcatcaatgaacaatgcaacagactgcataattgcttgtgtatctacctggagaaaatcttcaaatttattgaaaaatggcttgtgagaaatttaacgtgtctgatgcttaggggtctcagcgtccagtgctccttattgttaagctttaggtggattttaacgacaagtttagttttgaaaattttagggaatttaaaaatatgtatatttgagaactgaatttcgctaacagcaagtgtctttttgcagtttcttaacaccaacagtttcttttaactgagccaaagtggtgtgtctgcgggaattaggtggctgggtttgctttagcatttctctctgtagaactttaaaaacattatctgtaaaacggaagccattcatttcctgaatgactgtcttgtctcacagccatcgatgaccttatgactccagaggagaaggacaagctcttcactgccattgggtacagtgagaatgcctacaacttggctttgcccaagcaggtaggtgtcagatgtcttcacatgggctttgattcccttgctggattatcttgggttggattacattagtgatccagctaattaagtagctactgcaaatatgttgtcttcagtgtcattgccatatgccgttctgggaccttaccagttaaaattcctcaacggtaggactgcttgattgactgagtgagagaaaacctgatacaggttcttgttagagtgtgcggttaaatcttcaaaacacttttattgtgacatttaactcatagcaagagggaacaaatcaaaaacagcctgcttatttgataggctgaaaggtcactggctgcagtgacttccggtgtcatgatttagaatattgcgaccatcctagactctcccacacctcccctcccttctatccagagataagctgtgtccttactattcccacaagcatttgttcatttccttttgtgttttgctataacaccatggttttgttctgcatatttttgtctttctgtaaatggaggcacagcgaatgtttttctctcgtcttgctttgctgttggagtcatctctactgttgtacctaatatattttgctcattttcattgctgtgtaggattctatcttttgaaaacacccaaacttgcttacttatgcttttgttaagaagcacttgggttgtctttgtttctatttcactttctttcttttttaacgtgtgttttcatttccactgagtcagttgctaggagtgagattgttgggtgacagggcagatgtatgtataacttaaaagaaacagaagttccctaaacatcactcactgtgatggccattctttatgtttatttttagccattctaagaggatggcatactaccttactgtctttttaacttgtattctccaataataatattgaccatgtttccatggctcgttggccatcctggctcatttgtaagtgcccagtttaagttgggtaaggtttgttcttccattgttgtctatggatttacttacagctcatgtcctgtcttttgcatttgtgtatagcttttagagtcaggttgtgctctcagtaatgcatgctgctgttgtgttgttagaggttacactgactctggagatgatttgggggagatggggagtgtcagtgagtcgcatattgtgtgtgctcattgcgtgctctctctctctctctctctctctctctctctctctctgacctttgcccatatttcccttctcttgaatgatgtctgtagttttcttccctctaatgaagagctgcttgtaatattttcctgcttgtcttatggatactccccccacattgtgtttagaattctaggttgttcaattctttttttttttttttttttttgagtccataattctattgctgtctggcttttgctgtttgtgagccatactccattatactgatgtgtatgttcacttagttcctgtgtatgctgttttaatcaatgaagggcatttttatttacttaaatttttatagtataatttctaatttttctttattcttgagaaattcatacatgactacaatgaaatatgatcaagtccacctctgtttcccacttccatgtcccccgtatcccccaacatgtctcctcccaactatttctttctttcttcctctactcactgtcctccctgactctaacaactcacaagtccaattagtgtagctcatatggggtcatccagtggagaaagtttttaactcttttctttaggttttcaggatttgctgtgatatacatttatacttgcttttgtttacatagttggaatgtcataagtctcgtcagtgagagtagtctctgccccactgctctctgggtcctcctttggaatgtgagctatccccctttcagctccctgcatttctgtctctccactcttcacccggagagcttcctctaattctctttagctgttcctgggtctcagtcagtctagagggcgtttcatcagtgccctgccttgtgttaggacctgatttctagtattttcttgggagccttatttcacaggctgccttcatgctcttaaaacttaatattcttcgaggggaaatacatccccaaattctgtatcatctccccagtggctgtttcaactacgtttttggtttggagtatcacatgggcacacatatttgtgtgtaatggcaatgtgtgtgtgcatgtgtgtgtgtgtgtgtatgtgtgtttgtgtatgttgtgtgtgtgtgtttgtgtatgttgtgcatgtgtgtgtatgtgtgtatgtgtgtgtgtgtaattcgacagccatccagcaggcttagtttttcttttcttcagctagagcattggtctgagatgcgtagtttgcttaggtgaaggcttctcggtggacactctctgcttctgtcactgtttcttttaaactaagcagacaaacttggatcatttctaagtgtgcggtctgtctgataggctttcattgagttttctagtcttgtttattcatggagagtatttaggtgctggaactcacaagctttgttgaattgtttgataaggcaccatatttaattaaagagaaaccattaaagctagcagtcatttgcatgttaactgtttttatttattcctgtttagtatgtggcccatatactgactctgaagttggtcagcacctctattataataagagaaaacaggaatgttccagaaatcttgagagtccagataattggcttgggtacccaagtctcccagcgaccaggagcacaagcattgaagtaagttttaagaacttattttcatttatggctttaggccctaaatatatcatcttctgcaacatgaaagaataccgaagagaaacagcttttctttcatttcttttattttgcatgttttattgtgaattgtgtaatttactcttctgtcctctctcctttctgcaagtgtttgtcaggtagtgttttatttagagtgtctgccctgtggcagtggcttagggtacaatacatttctgtgttcaggacatttatattgtatctgataaaaggatatgcagaagagctaattgaagactttcacacattagacagtttactgtagagcatggcatgaataggacaggtatactgtgtagctcagttgtgggggagggaaactgaaacagtaggaggtgtagacagctgaacaggaagggttccaagagaagcaggaggcagctagaggatgtgggagtgatgtagaaacatggtgatagcattatctatgtctaaaccctgtgatgggaacctatgccatgtcctggggttgactaatgtaggcgtttcctgtggatgataaatagctaaggagacactgactctcagcaacaaaagcaggttttgtaggtaaatggaggccagcttaagaagatgaactgtaactttgggcatagggctggttgtcagggcaattttcaaagagatagccctaattttatctgttacatgcttgctctttcctcattggataggatagaagcaaaattagaacactggtacgtcacaggtttgcgacaacaagacattgtgccatcactggtggcttccattggtgacactacatcgtccttgctcaaaattgagtttgaaaccaaccctgagaacagtcctgctgaccagactctgattgttcagtcacagcccgtggaggtcatctatgacgctgtaagtgcaggcagaaagcggcttttgaagctgtctctagggttgagggatgaattactatgtaagtgcacggggaaactgagtgtgctatgaaatacaagagtgagtctgcatcctcggccttcaagtaggggactgctatggtcaggtgcctgtatcccagcactgtgggaggcaggcaggattggtcggacttgtttgcctccagcctagctccatgttcatgagaagccccgcttgaagagaataaagtggagagagtgacagaacagggcagcatattctcctctgtcctctgcacatgaacctgggtgcactcagccacatacacacatgattatgtattacacatgcatatgccatatacagacatgaaaaatgaatttaaaagtttccttttttagggctgaaaggatggcgcagggtaaaggctctgccatgtaaccctgatgatctgagttcagtggttggagcccaagtaaaggcagtcggagagagctgactccacagagctatcctctgatccccatacatgtgctatgatatgtgtgttcacatgtgcacaagcactcacacacagtgatagaatgaagttgaaaacattttacattgcagggcaatacccatgaccagactttccattgtacacattttagtaatttacacattttaggaatgtggtgcagtttgtttaacacagccacatctgtattgtgacccaagtgttcttggacacttaagttcttgcacaactccagaactttctttgtcaaataaaacctttcatattttttataatcaagtcttataagtaggtaagagtgaatagctttcctctgtttcttttctaaatgtcaaagtatgacataatccaagtttagtgttgagggataggctttcctctctaactggaggctaaaactggagggcgtgccagttgctacttccacaagccccacttagacctcttgccagtgctgtgacatatctcctctcccatcagctcactaggctggtccttgctcatggttgtctctcactcttgaagggaagtagtaacacagaatagctttggatcccatgcttcaaagccatagctgtttataaatgaggtgaattcttcagatttgtaacatagatttaatgtacaacctgtcgtgttttaaatttcttttacagaaaactatcaatgctgttgttgaattctttcagtcaaataaggggttggatcttgagcaaattacatcagctaccttgatgaaactggaagagattaaagagaggacagctacaggtgaaatctttagtgtgtctatcagcaccagctaaactccaaaggtggccatcttaatggaaacagtgtgtttaaagtagtttaggctttcttttctgtctatatcatacattggacatggctaactcagagttgaatagacttggtagagaggaagagagtaatggagcgttgagatgcttttcctgcgttacagccaagaacctgagctttagagtgaccttgaggtggagcaccacccccacctccactcttcagagccgttcatggtgctgtgcatgcctagttttaaagaacccagcagactgttacgtcaggttgcttaacaatcagcttgcaaatcgttctatgcctagacctaatactagttatataggatttactgtaatatataataatatatattaatatgtataaaatatgcatatgtaatatatacacatatacatatgtacatatgtatacacacacacacacacgcacacatacagagagagagagagagagagagagagagagagaatgcagcttttggcaagactgacactacttgatatctttcaagtgaaattcttagtctttttgttagtagtatcaccatgtacagcttgaccacatcattgtttccctggccttcttttaggacttacgcatatcattgagactcggaaagttctcgatttaaggataaatctgaagccttcttacctgataattccacagacaggttttcaccatgaaaagtcaaatcttctcattttagattttggtacttttcaggtaggtatatgagcatctctctctctctctctctgtctctgtctcctatttttttttcagttcacttgaactaactctagacttattgcatatgtattatatggctacccagaatggcaataatttggcattgagatcttgatggatgttttttctgttttctggatggaaaccatcttagttttcatggtttatagagtttaattttacagtgtcaatttctgggctatagattttgacaaaaagtcagtctgtctgtctatctatcttctatctatctatctatctatctatctatctatctatctatctatctatctatctatctatctatctgtctatctacctacctatcttttgattgctctaaataaccaaagtgaggttttggattttcctctcaagtctcagcatttgggaacaggtaggcgttaaactgaacggagcctttattccagctgggaaaaggaagcagagggtggagccgcgtcctgacggcctcttccggggcagtgtccagaaggcaaagggttcagggtgggcagtaggagagctgagccacagttggcagtcctctcaggagtcaggctgaggaaggagctctccctctgggcaggctatttgaagcagacagctgtgtaattggctcagtgactgcagatgcatctattgctcaagcggaacagacctgtggtggggtaatgcactcctagcgagctgcttacagatcatcaggaaattaggcactctcctctctttagttagaagttttgaaatgtgactaaggcatgctgatatgtatgtatgcttttctgttatagaaagaaattcagttgttttccttcactccgttttagctcaacagtaaagaccaaggcgcacagaagactgctaatgcatcccttgaggaaataatagacaaggcgtatgacaagtttgatgtggagataaggagtgtgcagttgctctttgcaaaagcaggtcagccactgctcagctctcagggcaggcagattagctccagtagctttgttcaagtatgtgcatgcattgttagccttgacgctctgtttgctctgcttgctcctgggcatcagtcctagacactgcctgtacacttgtcctgctgatcactttagaaaacccagtaggagtggcccaatgcagaatgccacagttgtaacagaggtcaacgtgggactattaaccctagggtactcagcaccatttgcacctaagcgcgtgtgtggcctgtctgtagcatgactatgaggtgtctgaacacagcagaagttgcagctggttctggctcttcactctcaatgctttgggatgttttcatgatctctatgctgcctttatttgaaaatattttgtgttctagcccagtctttaattttgtattattataactactttcatagatgtctgagagacttatatttaaagaataccatatctaaaaacttcacaagaagcttctttgattaaaaaatcttaaatgagagatgttcccgaatctaaaacattttaactgctgatatgatgctataaatgattcatgccacacacgatctcagatgatgggctgccctagaagcctacatgccctgcaggtgccatgttacacagctggacttgtgtgtacagttgggtcccatccccaggatatcttgctatgttcatacatattcttagatcttactaagatctcctctccgctgcaccgtgttttcattacaggtattcatcctgtagataagctctcaagacttaaatagtttatgtctcaaagctttggtgttttctgttgcttaagcacagcttttcagttttccatattgcttttgttactagaagaagtagtgttgattaaatatctctgagcatgtcattttgtggacagtcacctgaggacagaatctctgcctaccaaggttgtgctctcctctgcccagtgaggtctgttaacattaagatgacatgtctgctattgtctgtaaagagcctcagaggttcttaaaggagagtgtttacacaggccataaaaactgccctttttattgcattcccttaccaacaattatttgagcaatgaactcttcagtccctgtcatagataaagatctatatttgactgtattagccttgtgaaaaatccatctttggaatcttcctttggaacagtagtggctattacacatgagtgttttttattattatttttttaatcttttactaatctgtattaaaatacagatgatttaatttgtatgctgaaggaagtgaaaatttgttcactgaatttgttaagtattttctagcaatgtaaagtggttttatacagactatctggttatttttgataattaatatcaaaattattatttttaaagaggaaaattggaaaaagtgtagattccagcatccatcgactatgcatatactgcagccaatggatattcacgttgagttggccaaggcaatggtggagaaggatgttagaatggccaagtaagtatgactgtcttttgtattagacgtcaacaaagatgctgcacccatattacctactgaaatgtaaggacacagaggtggatatatgtgggagagggaaaaacagtgactattctatcttataatacaaatacattttaaagaaaatacttgtataggcttttatgctggctagttttatgtcaggttgacacaagctatagttatcttagaggagacaacttcaattgagagaatgactccataagattgtgttgtaggtaaaactttagactattttcttgattagtgattgatgtaggagggcccagccgcctgggctagtggtcctgggttctctaagaacgcaggctgagcaaccatgatgagcaagccagtacgcagcatcctccatggcctctgcatcagcccctgcctccaggttcctgccccgcttgagcttttgtcctgacttcagtgatgaactctgatgtggaagtctaagccaaataaaccctttttcccccaagttgcttttgctcatagtgttcattacagcagtagtaacccccactaagacatgatgtgtctcctatttcagaattcatagttagagttttacattgtataaatatcggctatctgagattctgaatgtgtgagcatcaggattcactatccgtgaaataaaagtttcaaaggaagttagctcttttggtcatgaaaccacggacaatcttgagaaatgtcctaaaggaataaagaagtagaagctagactgtgaggttagtatatcctcatgaaattgttacgctgtcttcctaaaagcagctttactgaggtttaactgacactctggatgtcctttaatgtgctgtctgtgtctccatggggtcatcactgcagtggggacaacatgtctgccacctgcagaagcttccttgagctccatccaccctctctttttcctgtgcccacttctttccctggaaaacattgacatgttccttgatcctgaagatttggtagaattttctagaatttctaatgagtgaaatcattgagctttagcttttttttgtctgacttctttctgtaagattaagattcactgtgatatcaccagggaaggggacaacatttgaaatgtaaaaaaaggaaatatctaattaaaaaaaaaaaaagattcaccgtgtggttgctttctttaatgttgtgtcagtagatccttacagacttcatgtgttctaggcctacagttttcttttagggagtatttaaacgttctggacgtttttgtgaatgagtgtgaactatgttggaagtgttctaggtgagcattctgtgtttgcatttgaccagcttggaggttgagctgtagaaagtgctcatcttttctgcctgcattaaggacagtctgtagatgcttgctctctcgttctggacacaagcagcagtgcctttgtttctttttcctgatcagccagcttttgggttcagttatttctcattcgtttttattctttaatctttatgttttccactctaggtttattataatttttctgtacactctctgagttttacctgcattttatcctagcttcttagaaggtcattaattagatacttttctttttttctaatagagataattagtactaagagttttacttaaatactattgtactgaatggcaggaacctatttaggaattaggtatctgccagcttgagctggtcacagcttagccgggcagcaggagagtaggctggagaagcatgtgagcagctgtggtcaagattgtgctgggaaagacaggaggcaagcagctgccagaaggcaagtgagtggtgcaagcagactggaccctcagcagcaaaacgtgacctcagggagcttgcatttcaatctgaagggacgggaaataagtgcacaggccacgtgtcaggtgctgcccagagctctggatgagcagagcaggacaaaaggaggcaaagagagatggcgcaggcactctgatattaatagaaagaaacctttgatgccaggaagtaaaatatatattgtggttttggtttttaatagtagagaattgtgttcaataggactttcataatgcattagtgagcttcaggctgtgtgtggcgatacactcccctaatcacagcagccgggaggcagagagtctgagaggtgaggccagcctgatttcatagcaagtacaaggccagctggggctacatagtgaaaccctgtttttaaaaagttcattaaaaacaaacaaacaaacaaacaaacaaacaaaccatttactgcagtggtcttcactcttcctagtgttgtgcccctttaacacagttcttagattgtgctgactcccaaccgtacatttatttttgttgctgcttcgtaactttaattttactaccattatgaattgtaatgcaaatatctgtgcttaccgaggcaaaccatgtgaaagggtccctagatcccctaaaggggttgtgacctacgggttgagagccactggtttgattaagaaagatgctttagaaggtctggaaaattggttcacagagaactttcccttctctaagagtggtctaaatgtaatgagattgaaacatggctggctaacccttgacctctgtggtctcctacccattcccttcccctccctgagacctcactgtcaaattgtattcttagatttaaagtgtcaggaggactgcctttgatgcatgtgaggatttctgaccagaagataaaggatgcgctgtgtttgattaacagtatacctttgccacagaagtcatccacaccgtctccagagagacaggtgagtatgtgactatggaggaaatgccaagttgatttctagaaagccacaccttttgagtactgctgatagtttgaggacaggccttctaaccacaggatggggcctggtgtgatggcacagagacaggcagatctctgattcccaggccggcctggtctacacagcaagctgcagcccaggtagggctgcatagtgagatgctgtctctaaacaaacaaacaaaatcagaaagcaacagaaataaaaggaagatgttcacatttgtgttggggttcaagagtcgcccacaaaccacacaaacactgatctcagtcagacagagatggtttattgaacacacaccttaagactgatcaatcagggctcagaatttggggtacaaccttgaacaagctttctctgtcaacttataaaggctaaaaccgcaaaaacccacatgagtgcaggaagtgccacctggtgatcagctctgactcaagctcttttagacttagcagttcatattgacctttaatttgatacgtcctgcataaagcttcgcagaatttcttaagatgaacaaacctcatacagaacataacaggatgtgtgatcagcatgaccttgctcagagtcaagttatttgtctgttgtcaatgactgacatagcaacaatatgaaagagttggcaagcatggaacaaaatgagcatggaacagctatgctggaggtggggcaggcctcaacaatgtataaaatataccttatatagaactagaaatagaatgctttaaaataaatttgcagataaaatttcaagtggagattgtccttttttggtgactcttaaatgttctacatcactttaattgaataatccttatagcttaaaataaatgttggatttctacttacttagaaaagaagtttgagaaagttagctggtgatgatgccattttcaaggccctatgataaatgtgtactgtttttatattgttactcacagcaactaagtgatacacggagacataaacttactccttgatttgtgcataattatatctttataaatatggggagtaattttaatactgtgtaggctccggctgactgttacttggttgttttaacttgtggaagatttgcctgtgatgtctgtacaggtatttttctttccatcttcctttatcttcctttctatgtttttggtatatagagatgtcacctgtgttatttaatccttctcatcagcatgtattaaaaatttttgcattctttgctaggtagcctcaattcctgttctttcaggagggacgaaagcacttcttgggacttcattgttgctagatggagtggaatcaggtgaagattggcatacgctgtttctctgtgacacgaaacctatgcgttgttatgtagtgagggtgtttgcggagagtaaggagtctcttatctgtgctgccaaccaacactgacttcagggcattttagtctttgatgttcacatctctgttggataagtaaagagttgtatgttgtttgtcttaagggtggataatgggacttgacagtgttttccaaatattcaaataaggtattgtatttctctgtaatacttttctctagctagggctaagtgatgctttacaatttcagattacaatatagaatgtcaacttgtagatataggtgaatctaacaaggttaaggcctggccactctggtgtccatagtggtagtcacatcttgatgatagatgatgcccagtaaatattttactggatattgaacgaatgaactaaagtgaaaaataagtttggtttaagttttagtacatgccagttcaagtccctttgggacttgaaaagtacattgaaagtattctgtctgaatatgaaagttctatgtgtggatggagtttactgtgttaaatctaggctctgtgtccatgtgggttctcagtggatgctgtctgggttaacgagtgtctctgtcctttagagtctgacgaggagttctttgatgctgaggacggagactcgcaggctgctagaactgtcaaagcctcagaactgaaaaaagctgctgaagttccaaatgaggagctggttagtctcctgctcaagtttgagattaaagaggtatgtgtttctgtccctgagcacgctcttgtcagtcttctggactgggagctggcctcagctcaagtgcattaaaaatgtgtatcctagtttcttttctggtacatgtgagtgtacacaaatgcacatgcaatttcgaaaccatagaaattattttaaaaaatggttttgggggaatcagtgagtgtaatctattctgggaaaactcaggtctcttaattaggatttgcatctctgaataagatttttgtctctatgtatgtatgtatatattacctccccccaccagctcctttcattttttttttttttttcaaactacagttgggctgtgaattccaaactggccttgaactatctcactttgtagccttggttctctttaactgtagggcattcctcctaccttaccctcctgagtgctgagattataagtctgtgtgtcacaagcagtgtaaattccctttgagctaaatagtgttggtcattgtcatgcttgtcttctgtggaaaattttagcaaactaaacttctaaacttttttttttttttgctttaaagaaagatagatggcttagtcagggcttctgtataagagaagggttagtgttaattggtaggtaaaaacattttattgattttgacatcagagcctctaaattccatcatgaagaaaaaagtcacatagaaagccaagcatagttgtataggcctgtacttctagttatcaaggaagctgaggcaggcagattacaacattattctctgctggagatacagggcattctggttaatttaacaagaccctgtttcaaaaaggaaacaaaacaaaagaaactgaaacccaaaagagggggtgggactgactggagacagagctggggacgtgatgatgtgatgccgagatgccgacagcttgtgaggctcgaacttcagtcctgaggactgtttctaaagagtagacgcacaggaaaaggaaatccaatgagaaggtcacagcatattttgagggtaaaaggagatttctgtgccctgcatatgattccttttagctacgtgtgtaagtttgctctgtaaaggacagtgttcatctccacattgctgggattgcagctttccatctccacctttgtcttagaaagtgcaaaataatacagagatgctcatggttgactttgatattgtagaatgatagatattgatttcctaaatcatcatgtcagatttgataaatcttaagtcttactggtattttcttggtctgtttcctacccttccttggcttttgacttgtctcttttttttacactttgacccttgacccctgtcttcagatgcttcagggtagttgttcttctcttcagctgctgcagtgctacttcagcctccatgatttgtagaagttagacccagtcttccctccagccccatgctcccagaaataagactcagactcaaaatatatttacagataccttgcccatatagctaggttctactctgactagataataattaaaataactattttaacttacattctgccgtgtggctggttacaggtgctcaggtaccatgtgtctgtctcttcacatctttccagacaaatttcctgaaggtctctatcccagaattctcttctcctccggatgtcccacctttatctcattcctaagccataggctttttaattgacaggtgatgcatccatacaatacacaagatattctctcaacatcgtttcttatgttttgaaaaaattgcctcacatgttttgatttttttttttattggctaaatatttttggctgttatttccaaaatcaatttaaatactgtgggaatgaacactcccactttttgctattatcagaagaatctatcagtgttttttttttcaaattaaaaaatgctaagaaccctatccttatttgcatggcctatcagtcctgatccccagtctttgtgtctggtgtgaggatgtgattagaatcgtcactctagcagtgatctgtgtgagaaatgactgtgcttctgtcattttaagaatgactaccacttactacaactttcccctgccctgtggattcttttaggtggttttggaactcactaaacaacagaaagaagaagagacaatcctagtatttaatgtcactcagttagggacagaagcaacaatgaggacatttgacctgactgcggtgtcctatttgaggaaaatcagcttggattaccatgacattaaaggtaacagccgtggaaatagaaatagtctcatttataatgaaacatttgcatttcattatgatggttatagtatgcagagcacaatgaacactttatgaatactaactccattctagaacaatggccattaggtattcatgttactgtcttcagttcacatgtaactaatatacaggttgatcattcacccaagttcaaacaactgtaggggacagagccctgactgagacattggaagcctggttctggggtctggtgtccccagccattatggtacgtgtcctcagaaagtccaccgacgttagggagtatcagttccatttcataggcagagaaaggctgaagaacccaaaataacttgctcttaccctctatcttgtccatgatggattttagaatttagttctggactaagggtacagaagcgtattctgttagagctgtcctgatactgcgacctttaatactttcctcatgttgtcaagacccccaaacatgaaatgattttgttcatacttcatagttatgtaggtttgctgtggttataaattataatacctgtgttttctgatggtcttggatgacccctgtcagccaagggggttgcagcccacaggttgagaagcactgtggtagagtgtgtgcacagcgcacaagaattgtgatagaattaaaaagttcaggaggtgcaaaggccatgctctcgtaaatttctatagttcatcatttcaatgtatttcttatgacctcagatatttgaggcatgaatgagtgacaattaaaattccccccaaatttgcccaatgctttagtcaaatactaagacattttatgatttttagaaaatagctgaaaccaaagtaaacttcaactaagtgttgccaattttcttaggtaatagactatgatagaacttatattacagacatgagtaataattgtaaacgataagttttctaggctgttttcttctttgtgtcaaataagactagagagggggctggagagagagctcagccattgagagtggctgggtttgagtcccagcatccacatgacacctcacagctgtctgcaactcctggtccaggagatctaacccttctgaattcctagggcaccaggcacatagtgcacacacatagtgcacacacatacatgagaataatatactcacacatataaatattaaaaaattagttataaaaggggaagatgaggggtgggtgctttctagctgttctagaagcagaattgacagaccatggaaagagaagcatgggcatggctcagtgattgccgagccagccctccctacacagacctgggagccagatcctctgtgtccacacacacgtatagttttgagctcaaaggagaagtttgtttcagctttgaaaccaaggcttactccgtagcccatgctggcctcagactcatcatatagtcccagtgggtctatactacaagggtccttttccttctatctcccaaggactgcgattacagctgtaagtcaccacagcctactaaaatgtaattttgaattgtcatcctctgtttaaaaataaagtttttgtattcttccccacaaccccaggtctaagcaaagacattgtttaaattatttgagtttagtagctataaataaaatattttaaaacagtttaagaatctactagatcttcagtttcatagttgcgaaagttaaatagctgtaggttaaggtcagagataaattagagttcacatttccagattcttacacccatagttcactctgctgcctataaatacacaggcctccttaaaaatatcttcagaggttttgactcttttgagcacagtatgaaagcaagtgaagggctttaagtaagctgggagtctaaggtcaggatttcagctgccttacgtcctcaccagtatccttgttacttcatagccatgaaaatgtacacagatatatttttaaagcaccactagacaaacacatgcagaacaatctaatgtttcaaaaaagcaactcatttgcatttctcttttaggatccagaaagaagccaattcacttgattagctcttcagacagacctggactagatcttttaaaagtggagtacattaaggtaagggccacaggaggatggcacagctgcctgggccccactctgtaccctggagagaggatgactgtgtgtaaggaatatagctcagcagagtaacttgctctcagccttctgctttcattgagaacagggctattacaaagctgccgggctgttaacccagaggccgaacccagggcacagcaggtgctcttctgtctctggggcgtatttgcaccactacacttctcctggcaattatttgagtatactacattaaaaagggaaagtgaggttagactgagttgagaagagatctgccaggaccggggatggactgaaaaatgtaccccagtgaaagggatggaagaaatctatggtgttcaccttcgttctagtgattccctggctctttgttctgtctgcgagggttgttgaatgtctgtgctgttggacatttggattgaagttgctttttcctgttcttaaagtgattgtaagttagaagagagagatgtgcaaacagacaagaattaaaatgtagtcttggctgattgaaaacacagtgactgcttttctaaggaaaagcacagtgcagagaggctgtggagaggccggcaaggtagccagggcagaaagctgctcataggaggcggtcctcagagttctcgtttcctcttagctcccaaaggacagaactgaggccaggcagtgcttatggtgagagacaaatgttttgacttagaacaaagaccccactacaacagaactttctctagagattcaatttgtgaagaactggggtttctctcaccagcgattgaactaagctttgtagagtggtacaagcatcagatgatggctgggtgaggtcacccttacctgttctctccttgtctttatcttttcaattacctgagggaatgcatgttcctccatgcttaataagagcactttgcactgttaggaaaaggagcgcatgtacttttaaaataagacaacatgatatatggtgtcttagatacctatgctgtgatcagataccagcgtctaatttggggctcacaatttcaagggttagagtccatgacgattatggctgagagcaggcagtaggaaggcaggcacggtacaggagcatcagctgggagcttatatccttgtctgtaaatagaagcatagacctgagaatggtgtggtatttgaaacctcaaagtctactgtcagtgacacatttccttcacagggccacaccttctaatcctctccaaaaagttctaccaattggggacagagcattcaaatatatgagcctttgggggcaacttctgtgaaccaccccagtatgtgttctctctcccccaccttcttccctttccacctcccctttctcttcctccatatctctccacataagcatgcacatgggtatgcacatgggcacacacaaaaaggttataaaaatttactttgctcttaatttgttctttggaacttttattttttttcaggttgataggaatgggcctagttttcaaactacttttgagaaaactgaacaaactgttaaggtaagaagttttacaaaagtagcgtatcttatttgaaaagaaaccactcacttcttacttgagtttgtgttcacatttctgctccttaagcttaactgtcatggacgccacgtttggaatcacttctagatatggtagcacccagtgattctggagcttcatactaacacctggcatttctataatcacgctggcctgttgaagaccaggaagccacttacatgttgactgtgcagatggccagggcgggcagttattggctccatgaccattctgtttgggaatggagtatttagttaccgtgatgctctcctgtgtccctgagtgtgtaggtgtcatatgctatccctatatctctacatcagggagtggtggtcttttctctctctttctctttcctattttggaggcggcctttgctgaaaccacagggggcaactagggaagaactaattttctctgtaaaactttcaggtggccttttcatctttgaatctgttgctacaaacgcaagctcttctgtcttctcttaactacttgacaactgtcatcccatcagacagtcagaacacgggtgtggccaaggaggtgcaggccatgcctgagaaacaaaagaactctcccctgcagaaaggtatgagagtaatcagtggtctccatggcacacatccaaggagaacaattgaaggagcaaagctttgctttgcttacagtttcagagatgtcgacccatggacacttggttctgttgctcctgagcctgtgtgttgccaggcaaagcatgatgaagcatatggtggagattgaggtgactaggaggcagacagacagaggtggtctaaagataagccatgccctgcaaaggcacaccagtgtattatctcccaataatgccattagattatgaagctgttaatggatttatctgttgatgaaagtcagagtcatagtattccattctctttcaaaacaaacacagtaaacaaactgacaaatctccagtcattggaataccattacctctgcttctagggttttcctcaattgaatcacctggtgcataaagcaggggtagtggatatagagaaacatagttgcagtttcagtatttgagaggctgaggcaggaggatcatgatttccaggccatttgggtaggtggcatagaaatccttgattcaaaaaaaaaaaaataaaaataaaaaaataaagcagcgcacacacacacacacggaaaaatataaacaatactactgttctaagacactttgttttcttcctgtggctggggattgctttaggaggatcactagaggaaactccatgtgtgtgtgctgagtccttcttcccatcctagtgggtctagaagtctcctcaggacagacagcctttgaggaaagagaccctgagatatgaaggcagggactatttgcatctttgaaacaatcttattttctatgtgttgggtgttctgtctacatgtatgtgtatacatcacatgtgcagtgcccatggagtccagaagaggacattcgagcttctggaactgtgagtcaccatgtgggtgctgggatcccagttctctgatccatttctctagcacctcaaagacttcctgtcattgttgagaatccctagaatttgaatccaaaagaacttagttcattttctgattatacaacttaaaactgtgtgactctaggcacattactttacttttttgttttatgttctatttactttagactttttgtttttatatgtatgtgttttgtataacatttaatgttttacaaatgttttatactcatatattatatattatgtaaaatatatgaagaaacttctgtagggtttagcttactagaatccattgctttatttttagtgatggtcccctccagagatagtgacgtgattggctttaggctgtttgccaaactgaatgctttctgtgtcactgtctgtgatgagaagagcaatattgctgaaatcaagatacaaggtaaggtgtcacagtatttcccagctgtttaacactaagcgtcttctccccttcccttcattctctttctgcagtgttagagaaggtatgtagagggggctctgaactgcacacagttgcagggcgtggctggactggatgcttaggattagaggatgtccaaattctagctagtgtagttgttttcttctttcctttccaaattggtaacacacctacttatataaactttgttcacaaaacgtttgtagccttcacctcaggcaaggcgtttactgctgtggtgaacaccaggaccaaaacctagggaggagagggttgatttcagtttgtacttccacatcagtccatcactgaagaaaggcaggacaggaactgggaagcaggaactgaagcagaaaccatagaaaaatactgcgtactggcttgcccctcctggcttgctcagcctgctttcttttacaacctaggaccgttattccagagtggcaccacataccatgggctggaccctaacacaccaatcactaagtaaggcagtgccttatgggcttacctacaggttactcttatggacacgtcttctcagatgagagtccctcttcccaagtgacataaaaccagccagcacagtcttcaagtaaatgacttaatatctataaaggcataaaaatgtatttttggctcacttatcctgattgattcctttgtactagatttcctcccagggaactgaaaatttatgcaattatattttattttattgcctttttaaaaacactttattatacactcaagataataggaatctttttcatgtcatagaaaaatgatatttaatgtatttttctacttcttttattctttgagaatttcatatgtgtatactaggcaagatgatcatagctaccaccatttccgcactgtagctcctctcaggtgctcccagcatgtcccctctcaacttcacgtccccttattacacttagtgacccactaaatcccatagtgctgcccgagtgcgcgaggatgagaggtcacatctgggagagtgggtaacctacagtgctcacacccccaaagagcagtgattcctcctcaccaaactgctatcacctgctctttagtaaggagtagggcatatataattagattataaccaaaaaataagtttgctatttagaaaactaaaaatatttaacaggaattttactaatgtgagtttagacattctgtatattcccaagtcataatgaaatgaaatatttgttgtatttatagaaattacagtacttaatttttttcaggccttgattcttctctttctcttcaatcaaagaagcagtcactttttgccaggctggaaaacattattgtcacagatgttgatcccaaaacaattcataagaaagtatgtaacaccgaatgggtagtcactagcttttgattattgcatagaaccttattttaaaaattaaatgtatttctatgaagattataatttcaggccttttctgactgaggcttttttttgctattgcttttctgggggaagagtacatttacatttctggcttttcaggctgtatccatagttgggaatgaagtttttcgctttaacctggatttgtatccggatgctactgaaggggattcctacactgacatgtccacagtggatggcgtggtggcactgcacgtcggctgtattcagattgtctaccttcataaattccttatgtcgctgctggtaaagtccacattgccccgagaagctgtagggctgtgatcacacatgttgtaacttggggctttaggccgtgggcggtttgattatgcctggtgtttatgtatgaaagtagtagccaaaagccctctctaactcttgaaatctaagtcattgaatgatttctgtctgtggttgaaattggtttcctagaacacacgtgctgaagtgttgaaaatgtgttcacacccctgggctcccgctgccccccagtgagtgacagatcactgctcaaagctgggcagtgactgaggatggccttccgcagttcttccattcactagactagggctcaactctaaagacgcttagaggaaagtgcaggcgtgtcagcagaaggtaggcttatccacagatgcctggcttctgaacttctccttttacatattgcccacagagcttcctgaacaatttccaggtggccaaggaggcgctgagtgcagccactgcccaggctgcggaaaaggcggccacgagcgtgaaggatctcgcccagagaagcttccgtgtttctgtcgatattgatttgaaagcacccgtcattgtcattccgcagtcctctctctccaccaatgctgttgtggtggatcttgggctaattagagttcacaatcggttcagtctggtgtctggagaagacactgcaaatcctccagtgattgacaaaatggaggtgcagctcacgaaactgaaactctctaggtacgcatgcccagagctgtgccatgaagtatgtactatgttctcatgggattttcacaccatgtttctttaactgaatcattttctgatataaaaagttgcaaaaaactctaatttttggtcagctggagttcatgtgtatatacattcttcctgtagctctgccagcttgtttaattctttaccttgcttgttttaaaatatgtatatattactgtccaaaacagtggttgctaactatttgagaatagaaatcttagccaggtgtagtgatgcacacctttaattccagcacttgggaggcagaaataggcagatctctgagtttgaggctagcctggtctacacagagagtaccaggacagccagagctatagagtgagacactatctcaaataaaaattgaaaaattaaaaaaaaagaacaagtgagagagaatgaaataacagaatatacattttgattctgtgtccctgaatgccttaaattgtatttctcaaagtaaggccatttattcttgttaacctatgatatgaatagtagtttctagaagttaatattggcacgctgtgtaacgtggatcaggcttgaggtggcgtcagttattggggtgatgttcactgtagtaaccccctctgcctgttccctctccccacccttggaatcacacatggcgtccatgggccctctgctgttgagatggtttctgcagtagcagatctttactctgtaacagcccttcgcccatgattcatgaggtcgatgccctggctctcctggtgactcaggacttcagcgagcttacacattttggtagctgtgtaagtaatactgtgtcctcagtattcatggtgtgtggcatgtgaggacacaaaaagatttaaaaatgattttcatctcaccaaaggcgatttaattattcagaataaataagagacagttatgggtgaagaagagaatccctgtgctttctgaaatggctcagcgagggctgtgctttctgatttcctgattccctgtgctgctgctccttcactgttgtgtctttggtctcagtaccaacaaacacactgctgtcctctgcttaaccacaagcatgcactcggaggaaggcactgtcagtgacgggtcattgtcatcagcctagggcagtccttctgtgtgtctcaatgcagccaagacacacaatacatgaaattttcttacaagtaggaagaagagagtctaaaattgtaggaagtatagtcgacgaggaaacagctgatggggtcatttaccatcttgtgaaaggttaagtattatgcataactgcccgaacgttctatgtaggatgggtagggctgtctgcatgttatgtgtctgttgggtaatctggtaggtatgcctaatgctgatggattaagtggatggcgctctgcttgctgttatagttcattgctctctgtgacagcctgtcttctgtttactaggacagcaatccagccaggcacctcccaccctgatattcagctgttgcacccaattaacttggagttttttgtaagtcggaatctagctgcaaattggtaccataaggtgcctgttgtagaaattaaagggcgtcttgactcaatgaatgtaagtacatgcatgaaaataactttactgttgatgtgtcaaccctgaaagctttctcatatgcacaaggaacgtgcagattatttcctgcatagtgaaagaaacattttagtcaaactttgtccaacaaatccagtagaatttaatcttcagttacgtattattaacttttaaatctgctatacacccattgtagaaatctgtgcacaaattacttattacattgtctctcataatgtgtattatttaaacacttgtttttaaggagattgagatatgcctcagataactattgtattctttaaagagtgatcgtttccagaatttgttatttaaaaaaatggccaagacttctttaagtacaattaactttaagtaaaattcagccaatagggctaacattgatttgcaaaaattattatttatacgttttaatatcttatttaaaattgtaggagtgaaggtgaagcaagtggtaaagtcctcaggtgccgatctgaggatctgaggtgtcacgtctcagctactgttaagattattctgtttcatgaccgagaatctgttgtctatatagtagttctttcatcttaaaatgatctctttttgtttattcacaggttagtctaaatcaagaggatcttaatcttctgtttagaatattggcagaaaatcttggcgaggccactgaagacttggataaagggaaacctagaatacaagagagaggtgagagcccgatagtggggacatacgtgcaagtgtctctctctagtccagtacacactgaatcctgatggtggtgacacatgcacacgcgtctctctatagttcagtgcactttgaatcttgttttcaggttttaaagtggttccttttttgtttgtttgtttgtttgttttgccacagtagggattgaaccagggtcttggccgtgctgtggtgcacaccataatgtccagttacatctccagcctgagactcaataaacatgtagtgcacaaatacatacaaattgtgatttgttttgccaagaaaataacaagatgttgttgaatgctagcatgactgaagcttattgtctctttgtagctaagcagttaacattcagctcgcttctaagatgcctgagttgggaggtcattaggaaaggtggccattagccagtgttagatctctgtaaaaagtcttaatttgtgtattaaaaaaaaattgaagaatgctaggctgtggcatggtattctatctgatatttaaataagacaggggtaaagtgtaagaatttaaattattaatgtttatcacagtaaacatagtatagtaaaataaagatagcaggaagtttaaattattagttatgggcatttttacttaaacatacacatgtgtatgcacacataacgaatatattaagcacaaaggaggcacccttgttcttttcaaacaagtggtggcacctgtgtgtgtgcttgctaccctttctttgctggtgattttctacactaacagttggagttgtacatatctcatatccatgtttgtgctgtgtggtgactcccctcagtgcttttaatgatttcctggtattaaattctgttgaagaatcatcatttttagcaagcttctacagatagatattcaggttaagttttcactcttacccatgttgcactgaaatatcccttgatatctacttttgtgtgcatacctgtcctgtctcaccagtgagaggttgtataatctttattaatataactcatatctaacaaagagctaagtaaatacaaagtttttataaattaatttaaaatttaaagcttaattgagaatttcatacatagataatataatatgttctgattaatttaaaattttatagatcgagaggaacgtgttctctgtactctgtcgtgttgttttctgtacctttctaacagttttatcaattttctgaaaattttgcccattgattgagtaaaaattacttcactgtacatttttacttttttcttgtatgcaagtctaagcatatcgctctaagtgttaatcacctgcgtactcactctgagcaagatcgagcctgttcctcagcatccttcagccatcttcctgctgctaagacggaccctgcctgcccctgccccactcagagctcactgctctctgacctctggtactcagggcttaatcttgctttttcattaatttaatgagtggatccatgacaagtttgcactttaatgtgtggcttcttttctgtgattcatgagattcattcgggcggcttctgtgctggtcttttctccagggatccctgtttccgcccttgtggctagaatcacagttgagcttgcacaacactcagctcttacttggttctgagggatccaaacttttgtccccttgcttgcatggcaagtgctttagctactgagccatgtccacagccccatactggggttttcatttggtcctcactactaaccaagtaagctattttatacatgccttttgactacttgggtatcttctttgtgactgtccaaacctgttaacaattatttttatctgatgcagttctgaggtaagatgatagatgtattgcctttctaagggtattagtgagtagggtagatttccatgtgggtttctggtatactttactgcagggcttgggtgtcaggatgttaactgcaatactgtggtgacagttgtatagttgatagtgaaggctgtcaggtcagactgatggacatgaattggcccttacatatgacagtaggcaaggctccaaatttgtttaaaaaattatcgtgctcatttgtgagttggggacaatgaagttcttcctccagaagagtggtttaagacttccgcaagacagtcaatgcatagcttatcacgaagtgtctggagtatgttacacatataacaaatcctagctttactatttgtgtgttataggttagaaaacacttttattgcacgccatggtatgtgtttcagaacagcatcagccgtggagtctttctttcccttcctagactggcatgcatggtccttttctctttcttagccttgtatcttgttacctaccatgccctagcctttctacagtctgctctatttgcagacctggccatgtgccatcatttttgcctgtatggttttcattcttacttttaaaaaaggcgcactatcctttctgtggaggactcctcctgctccgtgtgagtagttcctctgtgttaatacatcttcacctcgttgtctcttctccgtgcatttgatagccagcccattaacatttgcctgcttcttgtgagtaggttcagcttgattctttgatctgattttcacatgtctgtcgcttttactagaccatgagctttctaaggctgagagctgatatggatttgtggatcttaaggtgctcatacaagtttgcagcaagtatctatgaataaagaaacgaaagaatagaagcacatgtttctatttaacatctttaggtgaaacaaaagcctgccgagaagtctctacaccgcaggatgtgcacaccacacaaggtgtgccagcagccagagtggaggagaccagacccgtagacatcattaatgtactgttgaactttgaaattaaagaggtgtgtaattttatcacattttaataaagtgaggtgaaaagattatggctatttctattaagctaattttgtaggtaatatgtatgaaaaaaaccttagactgttaatgtgctttaaaatttgagaatttattaagatccagttacattttagggatctagttctctctctctctccctctctctctctctttctctcttttagagagaaatggaagcaattcatgtaacttgctttttaatcagtataggatgttaaaatgtggcttgtgttggatcttcttgtgagaagagcaagagaagggagatagaggaattttgtaaataaacgttagaagctctccatagagtaaagcacaggtcatgtgcatttaaaaatgctaccttgcttcagtatggattttcttctttctttatcgattcaacaactgtgcagtacatgccagagccaaggatacattagaaaatatataggttctaaatacagtggtgcgtctccattaaaaatatgctcaggataggctacgttcagagtctgtagtataaatggtagtgactgggcacctgagcaggcagagagggttaggagaggtttctgggaggaagtgacatttgagtggagtttgtaaagtaaagtaaataaatagtttaagaaaatggaatgaagaaaggggccagttcgagagaatggatgggcataggtagaaaggggtggacatagaaatgcatgtgttcttttcctagcatttgttatatatactgctgcagttccatccctgcagacctggttgagctgggggggggggggagaaatttgtgcctgctagatgggtatttaaaggtgtcatgctgttactgtatacagggagctgccaactggtgggtagagacaggggtgctcacgtgacctattatggtcaggatagcacccaaggcgaagaagccttgcctagagattagtgtgaaaaccagcagctgctttcaatagaatttcaggcagaagctgctcacaattaggacttctaggattggaccactacctgcctcccttctggccgctctaccatgcaccctttaatttaattaagttcattaattaattttgcttgtttatttatttattttggcatttcacctttgaaagtcagaaaacagtggtggtatctcaaatgcgtataaggtaaataacgatagacattttttagactcagaatatctttttcttgtgtgaatttcttttgtttttttttttttgttttgttttgttttgttttttttgtttttgtttttttttttttttttgagacaggctttctctgtgtagccctggctgtcctggaactcactttgtagaccacgctggcctcaaactcagaaatccgcctgcctctgcctcccgagtgctcggttgtgtgaatttctttatttggcttcttactgacactgtacactagtgaagcagttcatgataatccatgctcattcttttaggttgtggttactttgatgaaaaaagcagaaaggaaaggaagcccctttcatgaactaaagatcctgcatcttgggatggaagctaaagtaaaagcccacgacatgactgctgcagcctacctcaggaacattagcatgcggtgtttccacttccctggtaagtgtgcagggccatctgtgaaagacaatgcagctcttaaaaccaatataggcacagggctcattttctgcattcttctatgtgctgtgtctattccttacatatacagtgtgttggtgatgctgtagtaaatctcacttaaatgattgtagtgacattaagaagtcaaatcctagaacccgaagacccctttgaaaatttattaagaagcttaagtttacattgatttcattgcaaatcacatgaatggtaaggtctgttttaaattacattaatgtgtgcttgtaaaaagtaaatgttaaacaaaacataaatatatagaaggagatatgcagcctcaactgctcctctcgcttcctcccaagtgactatgaagctgtagttcaatgggcaattcactgtctaagtctgaggctatctgaattttatagttcttgtttgtttaagcttctaaaggcctctgtggagcatttttgagaagataaacttgtgttgagaataattccttcttgtattttatagctgctattttcttctgttaatgtttgttcacatgaggataatacctgtagtgctatagataagagatgttattgactagagctctttagatttgttaattttgtggtcttcgatttttctttccagtttttcaaagttagactgactgcggtatgagttgtagatagtataatccatttgcctgctttatgtacagttctctagtgagcatttctctgtgtgactggctgggtccattttacaggatgtttgaggtgctgaagggatgataagattggacttgtgtttttcccttccagattctaaaggggagcctctgcgcattgtcaacacctctgatgtgtctgatgggaccctcctgaaactgctgttcatcaaggtgtctgttatagtttcttctgttgctgggataaatatcctgacagaaagtcagtttagtggagaaagggacattatcactttataattcagtctatcattgtgggtaaatcagcacaggaacttcaaacccccagtgacattacacatctttagtcaagtgcagacagagatggacacatatgtgtttcctgcttgtttgtgcccagccctctttccctactattgtactgttagagtccccttgcctagggaatggtgtggcccacagtgcactggtcttcccctatcaattaactgaagaaaactttttatagacacgtccacaggccagcccagtgtagacaacccacattgagacttgctttccagattactctaggttttgtgaagctgataattaaagctaagcgtcacaaacctcatttcatgtctgggatcaatatttaaatatatgatattgcttattttcctctcattcttaatatttgaattcttccctaagcttttcagtccaagttggttgatgatgaattatagaagcgtatcaaaatcttttatactccattaacctcatgagcgtccttggggagttgaataaataggagtgaacagtcaaagctgagctatgtcctgaggcaagctgtgttataaattaggtagcagaagttttcccgttcgaatgggcctacctaattatatgcactgacatctccttcggaatagaataaggaaccttggattttgcatctacagtatgtagaacacatttatgtggtcagttttgggggcatattattatttgcctgtaagaaacatccttgttggtttttaatagcatacttaagttgtaaaatatatatgttttcaatgtgtgaaatgttagtgtttttaactcagtggtttaattatcaattgcttataggcagacagtgatggaccagactttaagaccattcatgataacaccaaacagaagctgaaggtaagtaagtctcttgtaattcatcctaagactagctttgtgagatccaatggaccttgataccattttcagttgtaagatgtaagatctaaaattagattgggggcagtagcaatagatataaaattagtgcatatagaattgaaataaaggtcttgtcaaaacttgtttctgaaaaaattattttaaaatgtgaattgaaaattgtttgtggaatatacaaatactttttatttttagggaattttgtttactttagtgtaacatagttatttggtctgatgttgctggcaacactgaacatttgaattctgtattggttttaggtttagagtaagattaaggacgagtatagtgcacagtctagtgcagacacacagtgtcatttgggcatatgtagacagcgtaggaatactcttgtgtcttcatttaagactcatcaggcttggttgaggttagaattaatgtctgcactgggagtgggcagaacattggtttgttgcttggtaaagattgacagtataatagtaatgaaaatgattaaaaccatactagtaagtcattcttaattgtttagaaagcattgaactattcttgtgttagttacatacactgaaactcaacccaatggtgtgactgtgtccccgttgacatgaccaccatcccccctagtggtgtgactgaccctcagtggcatatccccatcagcatagcagggcccacagtggtgcgaacaccatacctgaagttcttgtttctggtattcaccgccttaggtttcgttttcatccttggacttggtacttcatttggaagctttactttccctcatggattttttgtcatctgctatcccatcctctgactcttcttcctctgagaaggaacctgagctaaagccacttgtgggggagtccagaagtcttgccatcagagccggtaacagtctctcctatgtgctctcagactaactcatatgtgcagctaggatgaacgccaacaccttgatgaacacagtgtttaactgatgagcgtagctgcagaagaaagcagcttctattctgacaggactgcatgcctgaagaattgggaataaatgttaataggaatcatgtacttccaggggatttccctctctggctcttgatttgaaatagaatttgtaggttcttagcattgacacttcttcagccttctgtctagtaacagtgagaaggtaagaagttaaaacatggtgtctgtcatgctcagccacagaggtcctcttcagacagtgctgctgtgcacagcagctgtgagttctttttgggcaccagcttgacctctgatgtcttctctctttcagtcacacataaaacgtggtctacgttcaccatgtatgttacttgtattctgaaatgttggacatcaaatagtgaatgaagaacatgtgcttgatttttttaattcagacatttaattaatttttaaaaattatgtaaattactgataattctcagcttgaattaaatctatattactgatatcgtaagtataaaatttttagtgctattcaatctagtaaaaggaactgaacttttaaaaccatagaaaaataatgctgctagaagcagaattttacctgctttgttgttttgacagtgtcttgctgtgtagaccaggttggcctcagcctcctgaatgagagggcttcctaaatgtggccactacacctgacttatcataatgtgcttaacaaactaagatctttaagagagagttttcttaaaaatgtcatctctttataacatatgtgcataccatttgtagctgatctgagggaatgcaaggccagtgtgcaagctacagtcagtgtccacgcagcattagcccactgaactcttctctggtttttctgcacaacttgactttatggcttctttatcctgcactggatattgagccagcaaacagcctataatattaggattaaaagttgagagcccccatgctttttgtttatgggaaagttctgtttcctgcatgtaagacagagacatggaaaggcatattctaaataaataaggacctacacacacaaaaaaaattaaacccatttagttgtgagtctttcatctatctatctatctatctatctatctatctatctaccaatctacctacctacctatctatctggttttttgaaataacatcttactaaatatcccagactgggcttgatctcactgggtagctcaggctagcctcaaactcaggtaattcttccacgttagcctcttgaatgcaggatttgctaacactcagcttgactattttcttacatacacattttttggtgattttttttaaactttaacatattatgtagttttcttggcaactctgttgtagaattgcttatggacccatgatatataatctaaataaacaggatttttttcattaaagaacataaataattcttaaataataatgaatttcattgattgtttatctcaattttcatgaattattctttgatctagtatgtgataggactagttaaaatgtttgtactaaccaaattctagactctaacttagagggtttccttttttctccctgggagaaacagtgtcaggagcatgttcacccagtgaatggttccatcaaggtattgtggtggccgttattcatcactgaaggacaacttgctaggttttatctgagtggcaaaatccttatttttgttgccttaacggagacttcaatggttccttttgtatattgcgtgatttttattggtgaactattactgtgtttccttatctttgtgtatcatgcagcactgacctctggttcccactgcttttcagtgcccagctcttatgagggtgacgcgtttgatttgaagatcacagctgaattaaatgcctttaacatcttcatttgtgatcagaagagtaacatagcagaaattaaaatacatggtaagtaattctttttacatagtatattggaaagatggaaagatggctggattactttgtatagaaaatatacgcaagctttgaacagaagtgctttgaaacttgttatgatttattcctgacatgagatattcattatctatttagaacttttcagaataaatctgaggcgtaaggtttttattatggtttcctttacagaataagagagctttaaacttaggtgagtatcatagtaactctcccagggtaaaaataaaagtcattacccttgcattttgaccatatttggcttagcaaaaataatttgtaaaagacattttcaactttatttgattcgagacttcagcctcaggttatacagtaagttctgagaaggctggcatggctcagaccttgtagctaagcacaggctactgttgaacagttttatataattttctgttccttatttccccctgtaaaggttgttgtgagggtgacaatgatagatttattattgtgtgcacaagtgtgtcagatgttgtaagcagtttcagaagattgaaccatcagccctattcagcaaacactaccaagttttagctgtaggcagtctcttgtctgaaataatgagcatggcaaacttctgactttagatgattagaccatagatataaattattatagaaataattcttagccgtaaggcaatgttggtttgtttcagttttaaaaagacatatttatgaagtgcattgaaaaatactaaagtctccccaagtgagtggctctggtcgaaccaatgcatagcatactgttttcagagaatatgccactaatttatttaaaacttttaaatttcctcaactgttaagtatgaggagttatgttgacttaaaagtggttcaccttttatagataccacctacatgggaggtgattgtgataacgggttccatagtacttttcatttatcttgtatttcagttgtatgttagtgcttttgagtttgcttacaaaaaggaaatatctgtaaatggtatctcttctgcaggaatggatgcctcgatttctgtgaagccaaagcagactgatgtatttgccagacttaagaatatcatagttatgaatgttgattcactgtccattcacaaaaaggtaatcacaaaactgatttctgtgttggagtgtgacttttgggggccagatgccactatacatttgttttttgtctgacacggtgggcagattagagctgcagatgaagatgggaggttttgtgtaatgattttgaaaagtgactcctgggaagctcagtggtgggtcagtactttattaatgaggtgacatttatagaaatgcagagcattggctgatgttgaatttccatatggctttttcacctgtcaggctcctgtggtcaggaagtgtcctgagagtccagggagcaggcttgtgtagctctgacctaataaccctttgttttgtaatggcaggctgtctctattttgggagatgaagtcttccggttccagatgagtctgtatccagatgccacagaaggagagaattatggcgatatgtctaaagtggatggcagacttagtctcaaagtgggctgtattcagattgtctatgttcataaattctttatgtctctcttggtaagttcatttctacttgtttttgtttctcactgaagtataagtatggcgactatgtgcctgaacctaggtagttatgttttcactgctggggcatgtttgctagcctcccctcacctaacaaaggcgcctgaaatacatagctcaaaacaggaatagactatttggacttgaagagtaagagtttttcttccattgctcggctctcttgttttagagtttgtgatgagggagaccattctgaaggagggtgtgtgctgggcagggctggtgacctcatggatgctggggaacagagaggagagatggggccaggtcccagtgtccccatatagagcatgctccagtgactacccttccttccatcaggccctcctttctaacagtcacggtgccatcagtggtgttgcagcctgctagcccagtcctcactacaggttccttgacgagcgtttaaggttcagacatactgaagggctgtaaccacctgaacgctgaacagagtgttctaattaagtcaaccttttgaatgctggtaaagcaaatggaatttgcttaaaattcttaaaattacttatgtgtacatgtacccatgtatgatgtgtgtggcatgcatgttgcagcatcatgtttgctagacagaggacaacgttatggagtcagtttttttcttctacctttcatatgttccagggatcaaattcatgttgccagacttgggcagtaagcacctataccaattgagtcatgttgctgtccccaaaatggaagctttaatcattgttttgaatgtaaactctatcattctctaacattttcatagtacttttaaagtactttttggcattttatttttatttatgtacatatacatatacatactatatgtatgttttttgctacttgttttttaatatacaggatcttatatagcccagactggcttcaggttcactgtcactgtgtagcgtagtatgatcttgaattcctaatcttcctccctctacctcccaagtgctgagaactaaaggtgtgcaccactatactcattagctattatttttatgtatcttattgtttgtatgatttaatattttaatttaggacttttcaatattagttgtttggtagaatgctgaaaagtcatcatgcagttgaaaaataaatatcgaaacttaagagttttgactgtatttttgataaacaaggccatgaaattcttagttttactgggtccttaccaatgttggtctgaagagtttaaacctgccagttcatgagcttactggtcatccatttatacctaaaccatcatgtttgtgtttttagaatgtgtgcatcttgggggtagtgagagagatgaagtcactctgtatgattaagggatgcatgctaagaatatttagatttagagtcttcatttgggaaatactttattttcagttgaaatggaagtgaagtgtatcttaactacaaataacttttgattcctgttaatgattgccagatgatagacaaccgtatttgcatatctccagtacattacaaaatcttcatgagtaagctgctaaggccttagttgctgagattaaattctgttcttgcagccagaaagtacagagtggagtctgctttgggataaagtgctgtccaacatccttttcatttaaattccaatttaaggtgcctggttattctgaggaaaatgccgattatgtcataaatcccgtttctctcttgtgccctctccattgagctccctttcacttccttgggggactgtgcctacctgtctgtcattcctaacagtccacccgtcattctctaacaatcaacctctccttctgtcctaacagagcttcctcaacaatttccaagctgccaaggaagccttgagcacagccacagtccaggctgcagagagagctgcgtccagtgtgaaggacctggcccagaagagcttccggcttctgatggacatcgatttgaaagcacctgtcatcactattccccagtcttctgtgtcaccaaatgtcgttatagcagatctgggcttgatcagagttgagaacaagtttagcttggtttctgtggagcagctcgcgcttcccccagtggccgacgagatgagcatccagctcacccagctgaagcttgccaggtacgtgtgtgtcacttcactgagctctctaggtacgcgtgtgtcacttcataactctcattctttgtttattccaatcaggagactttgactactgctttctggccagtggttaatagcagtgtgctttgtagggcctgtgcagtatggttattcttttcattcttttaaaaatgcttataaaattaaaatttcctaatgaggaatggggatggtccacatgtctctattcccacctattcaggatgccgaggtgagcgcggcatgagctcatgagtttgagatgagcttagtcaacataatgagagcctatgtcaagatgctaaactctagtgtactcagtaacatttgtttttgttttcctaagttccacatagtatttatttttctttgtgggagagaccttccggatttaatacaatttaagttgcttgctcctaaaccttgttacatttagttttcagtgaagcgtcccagagtccctgaatcccagtgggagagaaagccttgaagctattgaggagcagcccttaggctatgtgaagggttatcggcagacaggttagaaatagcccttgttatgtgggcagtaacttgtaagttgatatgcttttctcctggagtttggagaaccgtatcaagggataaatgcacagtgaatttcttatgattcagttttgacaaggtatggcctttgtgtacacaacactgtcttggtgatcgtagacacattctttagacctgattcaaagtttgtctgagtttattgtatccagtagctctgcctataaatctgatctagaaacatgttctaaaataatcctgatcacagcttttaagcgtttagggaagggttataaaagcatttggaacagggcagtcctcattttaagtaaatttaaaagtatatagatatctgtaaaaaaatcctcattttttttctttcagaactgttttacaagctgattcacctcagcatgacgttgaaatcttaaaacctgtgaacatgcttttatgcatacagcggaatttgtcagcagcgtggtacacacagattccaggcatggagataaaaggcgaacttaaacctatgcaggtgagcctgtgagcgagctgtggaaagcctggggggcggggcttaaacctatgcaggtgagcctgtgaaagagctgtggaaaggctgaggggcggggcttgccttgctggcagctcagttcctgatgtgcctgaaaaccagcagggacattgtccttgtcccacactctcccttattccactttagttaggtaaaaccaggatctggccagtggggatctactgaaaatatctttcttaatttagaaaatttgattaacttcttaatgtagtgaaattgtcagagagttaaaagtgaggctcagatactatattcaaaaggaaagtgttctttctaggtttgcaatgttttcttgatgcatgatttgcatgtgttgaggcacaatcacctggctagtattaccctttagaaatagttacttgagcagacatttgcatttatttgggaagcagcagtattttcagaggtgtagtttgggtctgtttgggtttctgaggtcaagtgttaaactaggaaggatatcagtagatgaccccagcagtgtgtttccagttggatagttcttagaaaccttggggtcacctctaagccttgtcctccagatgtatggaagggcagtaggtgatacagtttctcacgttggctagtctgcaggcaggtctgtcactttgggtgacatcacaagtaggaatgggcacccaaggaagttttaaagtagatgccacacttgttaccagaggactgggcttgggataagcaaaaggttcttggctattacctggtgcttcgtgttcccccatcatcacataggcaggaaggtagacagagcttgatgagtgtgcatgtatgtgttttgtacgggctgttgtatgtgctgcagggagggagggtggtccaaggagaaggacgagaagcttcaaagcaaagcttgacttaatggagcttaatagcctttggcagtcacattcagtctggctgcttcgtgttgttcagcttgccactaggaaggtgttattattcatgtcctaacgataaaaaagacttgcaataaagaagctgagaaacttggctcacacagagcttaaaggcatagagctgatacagatctgtctccaggtttttgttctttcttttcgtctcaccttttttgtaacgtaaaagggagatgccgccttcctggtatgcatgatggctttagaaagtactcagtagttggattagatatgattataagaggtagtattgcttgctaagataaacagatattttgtgtatagccacttatgtctgtgctgagaagagagctaccgagcaagagaacatctcagtccgggtagaggtcagaaactgagcacctctctggaccgcgcttggagggaagcatagcacaggctctggagctggtgacacaagagaggggcaggatggaggctggagtgaggcctgggaaagggtgctgtggtcccaggtcagcaggaagggtattggcttccagaggatctggctgcactggaggcatgcgtctctactgatgctcagctcaggtgttctctctcaaaaatagatgaatcactcattcatcaatagtagctataaaggcataatactatgtgggttttttttgttttttttgtttttttttttttacattacataaatacattatggtggttttcaggttgctctcagtcaagatgacttgacagttttaatgaaaattttgctggaaaaccttggggaagcttcttcacaaccaagccctacacagtatgcacaggaggctgcacgggtgaagagagatactcggagtgggcctgactatcttaaaggtaaaggctgatggggcttttgtgttggtatggaaaactcatcaagatgatacattgttgtgttagctcttcagcacagtgtgctgtaaaaggacctactgctcttagtggttaccgtggaaggcctgctggagttggggctgcctaccaaagtgcccagggaggttgtatgtgttgtctctggtgaggggagggccagttgttcttgcctgcatagcgattagttgtgattggcttgtggaagttaaatgtgctaaattcaccaggcactgaggtgatctacattgagagaaaactcgaagcaggcaggcagtgtagtaagatgtcagagtaattcagagaggaaggatcttggtatgtgactgaacacgaggaaggtaggtattctcttacagtagcagctttatgtctggccttcatggagaatgatgccgtgagcacaagacaggtttagatcattaaagttaaatgtcctaagagctctgtggtcctttaaattcacccatttaaagtgctacgtggaatataattacagtcatttttctttcttttctaattgtttttgaggaagactctcactgtgtagccaagctggcctcaaacctgtgatggttctgctgattcggtccctgggtgctagagttacaggtgtgctctgccgtgcccaactttacattttcctttatttaaagccattgatgtggctagcagatgttttatgagatagtcagtgggtgttatttccacaactaaagcaagataaaggaccctttgtgcccatgaaaacctctagtctgttctgtgtcctttatgagactcagggcatggagttaactgttgaagctgccatcagtgattactattaagatatcagcattacgtctataatgtaggcgaggcatgttttgggattcaaagagtgtgtgaaagaggtttctggtttaagtagatgagacttggctgtattgggtgtgggcaggtgctaggtaagcaggctgtggttacagttagacgggatactgtggaggtgagcaagcttagccgtgatcagatttgtgattctggttctcactttctgcttaatgggatacccgggaaaatataaatgtgttcagatgcgaattacaaatactcaaattaaaaatacatatcaacagtgaaggttgggacagaaattcttctctgaaaccatggaaccaaagctccgggttttttccagcctgcaaagctttgcttttctagtaacttgaggtgactttcctaaagaatgacccctagtctccagaaggattgtagaggatctcttctgtgtgtcctgcctgcctaaagacaggaaggaaaatgaagttccttttggagtcccttcatgtcagtattccaacggttcccaccgtgatgcgcttcagctctgctagcgtgctaatcttttctaaggtgcatcggagatcgtggagagtgtcctgagcccacagaaaaccttggccagcctctcagactaagcagtgtttgacttcactgcatgctcagtttcatgatgtcttgagcatgaccgaaccagttaggacaaatgtgctgtggttactgcagaaactagccttactttgaagggtcgtttcacaacgttgccttgatattatttataagatcatttttttcctgtggtctacttctaacactttgccctttactaaatatatagtgatcagtcattgccatttttagtgtctggggagttatttaaatatggtgtaaatttggaataacaatttatcatcccagctttaaaatgtttaaagtgatgtgcctccataagagctctgtgattttcttactcatgcttgaaccatcagaacaagagctggcggacccaaagccgcccggggaccagaccgtcactcttcagtttgatttccactttgactctctttccatcatcctttacaacagtgatagcagccaggtaaggaggacattcctgaagtgaatcctttgctcttgagaatattcagctttcgaatgttggcatttttcattctaactattaataaaattcagtgcatctacaaaccactgtttaacctgaaatgtatgcgtgggtctctaggctgctgtgtttctaatcctgccaggctaaggaaaggtgcgtagggtttctctctgtctaggaacacagccgcaaatgcatcctatccatcactaatagagaagttgtacatatgaccaacaggccatgtgcttaatttaatgcatccgtagtcatcactatttaggaagaataatttaatactgtctttggagcctttcatgattatgtctcagtcagtcatagagaagcatttatatagtagatcaaagtattttagaaagccactttgcattgcataatatcttttaatgaatatttttattttataaattagttatgtcatattttaatgctgataacatgtcatataaatacccataatctatatttattatagattttatatccatgttcatgtgcatttcatatgctaatttgtactttatgatttttagaagttatacaatattcatatatttctacagttgagctttgtgataatatctgtcatttatgcattaagctgcctaaatctctagcccttggtgttcaggcaagcctcagcgaatgcctttactgacagtgaaacttacacattcttcatttcacttaaggacggttgtctgttgatccagccttaagatgcagctgccattttcagcttctctctctctctctctctctctctctttctctctctctccttccttccttccttccttccttccttccttccttctttctctctctctctttctttctttctttcttttttaattttatttttttattagatattttcttcatttacatttcaaatgctatcccaaaagtcccctatacaccccccccctgccctgctcccctacccactcactcccacttcttggccctgtattgggtcatataaagttcagcttctttctttaaccttcctcattcagacactgcacactgtcacttttcttttggtaaatatcccgtttcctgaaatttctcactgctttatttcagctctgtttttttttagctcacacatatattgcagaggcttctgttatctgtactaggcagagggacagtttgtatccttggtgattctcatggagccacttagagcttcttattttgcttcgaaacattgaatgttatgctacatgatcctcactttatctaaaaaaccctcattccagatcatctgtatcacggattgattggaaatgtctgtgtattacaggcatcagctgtgtaacaagccatttctgtcaatagttacccaagtttgtgtgtctgtgtttataagttaaaagcattctgtttgccaacagtcctatcattcacaatgccttgcgttcactgtactgtctggagtcagtgcacatgttgagtagtgtccagtgtgcccagggtgcagacagatgcctgagcgcacccttggactcacctgtgttcatgtactcagtgtcatatatgtgattctgcacttagagacttcgtgagttgatttgttttcaaaaagctttgagttaaggaatgtgcttaaatgaactcatgtaatatttaaagatcttgtattcctttgcttgacaaatgtaccacaggagcccaggctttcatttcacaatgacagtttccgtttgggtgagctcacactacacctgatggcttctgctgggaagatgttcaaggatgggtctatgaatgtcagccttaaacttaagacgtgcacgcttgatgatctccgagaaggaatcgagagagccacctccaggtttgtcagctcagagtttgtcgtgcagagtttcaggtgaatgccagcctgccactgtgagggtgggatcctcagaagagtctagcctttggccatagtctcacaattgagttgcaagaagagacatagccctctctgattcctctgcctcaaactttaaatgaaaggggaatttattaataaaacaaaaatgccagctgagcagtgagagccaaaggagttttcatggtttaatccacatgggttggtaacgtatttttctggatgattgccagttggcagaattatcgtgattgttttaggatccttaaattcatgcatccctttgttttcttgtttactttgtctttcaaaacaattctgcagaatttaatttttatcaggaatatactctgtcgcatcaccatattatcaactcattttgaaaaatgacagtcttgtatgaaatttaatttctcaagttacgtgtcatattttgtacttttttatgtgtgaacgactatgttgctatttaaacttgggcaccgttgactattttctggattctgctgaagcctgtgtttttcggggaattgaacacataaggaaagtgtgctatttcatatccaggtttcctggttataaacttcatggccagggtagctgttcatagcactttaggtcattgtgattgattgattgataaaatcttcttgtttggtagcctaatctctctagcacttgtgagggtgtgtaggaaccgtcattgtggactgataaacacttgttggtttgggttgcattgagcactaggggaataaattctatagggtaatcattttatatagatatattctttcagggaagggttaatttagtagaataaggaggtcatgttatattttgagggactgcattcatgcattgctaattgctcaagatcgttttcagtagtccttggctttcctggaattgcattataattacagaatatctcataatgcttaatcgcatgagtctttctttgaagattaggcagccatgtcttggttgctaattgggtgattaggttccaattaacactgttgtatttctgttcagcctagcagctgaaaggtgaaaggaagatgattaagatgcaagggaacatttccattcctttactattttattcagagaagagggggccagataatgaatggcacatttgtttttcaggatgattgacaaaaagaatgaccaggacaacaacagctctatgattgatataagttatagccaggataaaaatggaagccaggtcgatgctgtccttgacaagctgtacgtgtgtgccagtgtggagtttctgatgaccgtggctgatttcttcatcaaagctatgcctcagagtccagaaaacatagccaaagaaatacagattccatcaagacagactgccgcgggaagagtcaagatggagaaaggttagcagaacttacctgtctgtcctgaagatgtccatatcttaacaaatattagaaacaggagaacaaagaatttgaggaagtaaaattaggcttttagatttaagcatattctttgtaaaactccagcaaggaaatgtttttaagtgaggtgtgacagacatgctctgtgatggggcagaagctgccttgactccatttgattttcttcacttagaaacagagggagttaaccagtcggggcagaatactgttttataaaagggagtcatttatccagacaagattatttgaaggattctagtgcattgatgggcagtagagaagctggaaggcagaggctggcacagaggagaacaaagcatggcagacctttgactctgaggaagcctgtgaatgcctgtagtaggagaatggtggaagccattctcagcttggtagtttttatttgccagctttatcaaatagattggagatttttctatgttaaattttaaattgctttaaggtcaggtattttgtttagtgtaaaacctggcaaacttgcaaactgagcatatattggcaagattggagtattttcccatttgctgtgatgttctgaatagtggtcacaccacataacatcatgttggcttctgtaagtttgtactgtggatggcatggcacagagagtgctctgtgggtaaagtatagtaaactagtgacaggttactttccttcatcagaggctcttctcctggcgactcagtcttgtattctgctccttgccccataacattacttaacactgtgtgtttctttatctgtgcacctgaattgcatcccaagaaactccccagaccatgccattgctaaaagaaacttcccagaccatgccattgctaaaaggtccaagtaggagtggccgactttggcttgctgtctaattgcattttttttatagactcagcagtgggtacatgacccactgtgaaaatttacattaaatgttttctgccctgctgttcctccagatgactctgtgaggccaaatatgactctgaaggccatgatcacagacccagaagtggtgtttgttgccagcctgactaaggccgatgctcccgctctcacggcctccttccagtgcaacctctccctctcaacgtccaaactggagcagatgatggaagcttctgtgagagacctgaaagtgctggcctgccctttcctcagagaaaggagaggaaagagcatcaccacggtgagaaagactgtggatgctggtgggcagctagtgtgagggtgggatcacagcaggctctgccagaggggagagtgcctcctggaagccacagacaggctttgaggaccctgccttgaggtttcatgatgttaggaggctcagtcatggcctctagtgacagaagtagggcttctccagatgaatttttccagctttttatttgttctttgaagtaaagccagtaatcgaatgaaaaagtaaacttgctatgaaaaaaaaaaatctaattggagtcatgtgaccaaaagagatggttatgtttgttgttaaaagttaatttaaattatgcattgcattattattgaaatttgtgattttagttaattacttcagttataccagttatttcttgtgccatatctgtgagtttacgataagagacccttaacactgtttggctcactcgcagcattgttttgagtttggagaattttcaagctatgttctatgctaaaagaagtggggcctaggctcctgtgcttgatagtgagtttttcttttacgtgtcacagaaagctgatagcaaccacttctttgaatcaggttctaattaaaatcccatgccattgtcgcagcctctgtattaaggctcagtcactttatatctccagtgatatacgtgagattccaggtttcatagttcactgctccatcaagcctgaagatgaggtttgttctcagaaggaccatctgtgtgtggtattcacagccctgtttgtcttcacgaaatgtcatatgctaggtgtaccctaggtgctagctcccgtttatagttatcccaaagggacaattgatgcagggcatcatttcaaacaatggttcttgtgggtcatccctagaggtcagatatcagatatcccggatatcagatacttacattatgattcataagagtagcaaaattacagccataaagtagcaatgagaataattttatggtttggggtcatcacaacatgaactgccttaaagggtcaaggcattagagaggttgagagagaagatgttctagcaagaaggcaaggctttgggatagtaagcctgcatccctagtccttcttttggatttggagtgaagactttttccaggtctatttaaagtccttactacttaaagtggtgtgggcttgtgtagagaagagctttactaagagcctcagtgctgtgcctttgcttgtgctgtagctaggctagttctcataagtgtgcagtgcataagggatcgcttactggggaaacctgactttcatttttctctttctaggtgttgcaaccttgctccttatttatggaaaagtgcacatgggcttccgggaaacaaaacatcaatattgtggttaaagagtttgtgattaaggtaggtgctgctcctgcacattctctggcgggaggttcagttttactcttatgcactattgtgtattctcagtgctttgcagcagtatcttttggtgcctttctcatactctttgaattattgctgggcacaattttgaaaatcaggatagctctgtcacttgaacaccttttctttagtagacatggttatttgtgttgttttataaaggacactttttgaaatatcttcataaatctatttattactgtgtgtgtatgcatgtacttgtggatacctgtgtgtgtgtgtgtttgtggggtgtgtgtgtgtgtgtgtgtgtgtgtgtgtgtgtgtgaatatgtataccatggcactgtgtagagttcatagaacaactttctggagtcagttctttcttctactgtgtctccagggcttgaactcaggttgacaggcttgcatggcaagattttatccactgagctatcctacctgcctgtaataatacctcttactggtacaaattatgagagtttctagtatcttttatattgcatatgtgtgttggggttgtatggaggggagaacagagatggagaggaaagaaagggcagcgagataaagatgagaatcctttatttgtagctatttgtttggcttttatttacgatttaatttgattcagttcaataactttggtcaaatattctctttggctttcagatatgcaaacggcaggtatgcctgtgagatgaatgatgaggatctgttgtgttttaaacccttatgtaaagcattgaaagataaaagcctctggcttctcaaacagcattcagattctctgtgtccgttttcttctgtatcactctgcgtggtgtgtgcatggcaaggcagaagttggcctttggtttctttctctcctccttatttctttgagatggtgtctctgtagctcattggtaggctgccttggctgttcagcaagctcacagatccagccacacctggccttttacatggctgcttgagatctgggctcaggtcctcatggcttttccagagagcacttcacgcatctagcatctcccagtctggcctttacattccttaagcttgactttgtgcccattcatgagtggaaaatacagaatatgaaaaacatgaaggggtttgtgccagtaatggtaggagctttgctttgtaggtcagagacagataatggttgaatttaggctaaatgaatttcatctgtagtattgtataaataatggtacatcttcccaaatttaaaaaatgctgtattttattaaattgtcttaaattgtgttttgcaaattaataaattttccagtttaaatacatggaacaaagcctctttgaattcatatgtgttttctctaagacactaggttaactgctaggataatagttcatatctgtgtgtatgtatgtatacatgtatgtatgtattaaagaactattttatcttcttattttgtaggcagggtcttattttgtagccccatctgggctttaactcacagagatccctctgcctctgtctctctagtgctggaattggagttctgcactactacactctaccaaacactttttctttactgtgtgtaaatcctatgtagggcgttgatatccacagtcccagcagaggagagagttaatgacacacagaggaggaggaaggagaacagtgatcatagctttagtgcaggcagcatgcacaggggctgttgggagaaaagcatgcatacaagggagtgcataggaaaagctatctgtaagcagggcttcctgaattaagtttccagacttgatagaagttgaatgattggtgaagaggaggacaagtctatccatacagaactggagggacgtgtgcgcaaaggcaaagtctgcagaagaagaactcaagaagaactttgagggtgggcctctatagccagacagatggtgtgtagagtgtaagactgagtgagcatttgctaactaacagtaggtgatagtcagaaggcaagggaaaataaaggccttggatgctgacaggttagcaagcagtgtgtgctggagtctcggtttggtaatgtcctaattccgaacgaagagtaaaggaatctttttacttaccctgctgtgtctcagattctggctagccagttgaacaggcactgcctcacaagcagctttctaaatttgaatttatatggagaatgctggaaagttaccagggatcttaacccagcagtgacttgcctgggtttggctttaaaatagttgtgctggggatattttggagggcaggctgagggtatcaggtggattaaaggtcattatttgtatagtgctgtggcagagataggagtgagagtgagccagggcattctccagagatgaggaggtgtcatttcctaggacttggggtgtaataaaatgctcttccatctcagcctcctgcttctgaccttgattaggaaagttaactaggaatatagggaaaagttcactctgtgtgtgtgtgtgtgtgtgtgtgtgtgtgtgtgtgtgtgtgtgtgtgtgtgtgtgtgtgatgacattatctgattctgaattatccgtttctccattgggttttgactgttgatacaacatgaactacttaattccagacaatccaagcagaaatccttatgtagttagttgagtcctgttttcttatgttcttttgttcaggaatatttagtatatttaaatttaagttacgtaattgttaacttttaaatcatatattttaactctcatttgggaaagaatttattctaaatatttttctgcttttatttttaaagatctcacctataatccttaatactgtaatgacaatcatggctgctatgtctccaaagaccaaagaagatgaatggaaagacactcctaaggagacagacaatctctgggctgtcaaatctattactgattataactcttggtttctcggggttgacatggcaacagaagtaacagaaaattttagagactctgaacatccatcgatagaggaaaattgtgtggttgctgtggagtcagttcaagtcaccttagagtgtggcctagggcatcgcactgtgcccctgttattggcagagtccaagttctctggaaatattaaaaactggacttctctaatggccgctgctgctgacatgacactagaggtatggccacattggcaccttcagagctggaaagtaccattgcagaagtaagatgcactgctgtggccagtgaataatctaatgtttaatgtgatggtgtgacctgtgattgttagccttaaacatctcttgctcagtaagacctgacagtagagcaatgggaagggggaactacatcgtgttttgtgtgtatttctttaggtggggttttcaagtgtcttttgctataaaaccgtagcttaatataccttttcccactgattgtataattatatgattaatgttgaacaaccaagtaattgaagttcttcaccctttttaggttcactattacaatgaaactcatgccgtctgggagccactgattgaaagagtggaggggaacaagccgtggagcttaaagcttaatgtaaggaagccagtgctcatgcatagcatggtgtcgtcatcctactacagtagtttttaagctcagtgactttcaaaatttggtctagggtccaggaaactccttaaagttcttgaggccataactcctctcatagtaatggggaagcatcacgcatagctctttattcctattttctcatgaatgtacaattgactttttgagagactggataaaaaagttcagtggctgaatgtgtagcgggagtgagaattcatctgcttactacaggccttcaggacacttgtccaaacctatatccatatttacattttcaagatagttcccactaaaatgttaacacataatttaaaaattttaaatattaacttttttctcagtttttatttctaatgtactatatattggtaggtaaatctcatgatggaaacttttgaattattcagtaatttttttttaggggtgaccacccaaaaattgagaattaatatgatgaaccctctgactgacatttctcagaacccttgctgtggaagtatggtttttcccctgagaacacgggactctgagctatgctcttactgctcaccgctctgtggtcagacggaggggtcacacacagaaaccgctgcagcaaattcttcttttaaagatgataactcttttttttttttttttttggagaaagggtttctctgtgtagccctggctgtcctagaactcactctgtagaccaggctggcctcgaactcagaaatccacctgcctctgcctcccaagtgctgggattaaagccgtgcgccatcactaaccttgtaacccaattccttctgactaaagtagagatgatatctgtctacctctctctggaataatgagactgaaaaagaatatttagcaaaggtttcgaaatgctattggaatgaaaatgtgaatgttatctggaataagtttgatccgaaagcttaccatattatttaccaagaagtagtaggaagagtccttttatttccagatgactatagccagggtcagtggagagttggagtcaccttcattgctaattaacacagaactgttgtaggagctcgcttgctctggcaaggagtcaaatggtggggctgacttgtcaggcttcctcggcagtgtactgagcatttcctattcatgacctatgtgcagagagaaggctaccattctttgctgagtcagagaggtgtgcatgtggttgaaaatgaaaccctgaggatctgtattctaagatatccagttcagctggatccctccaggtagagcttttaattgctgccattgattcgttggctgatcaattctgtacgctgtttgtcttcctaggtaaagaaaaacccgatccaggataaaagtttgatgccaggagatgactttattcctgagccacaaacagcagttcatatttcttcaggagctacgatgaatatcacaatatccaaaagctgtcttaatgttttcagcaatttagcaaaagtatgtggtattctagtgtggaatatttcatgttgtgtttaggaaagaagcatgtatagattttttttgtgtgttttttttgttttttgtttttgtcatcaaaataaatttcagaaagcatgtagccatggtaaagtgctcatagaggtgcatcgctgaggtcttactgggctgtgttcctttgcagggtttctccgagggagcggcttctacgtttgactactctctgaaagacagggctccttttacagtcaaaaatgcgctgggtgtccccatgaaggtgcagcccaatcgtaacctcaaggtcatgggctcccctgagaagagtgacatttatgacgtgggcgctggtcagcacttggagctggactacgccagcctggaaccttcgcgccaagggaagctgtccatcctgagccggcaggagagctcgctcttcacactgacctttggtatggttgctgcgcttgctgtgttttcagagcttcgcagggatggcacagcgcagttttgataagtcatccaatactatttcgccaaagatatcctgggagacatttgtccaggtttccaataaatagttgataattctcctctggatttcttctaaacataagatagactctaattaataagcaccttataaaacatgattattaatttctatgccctaagaaataagcattatgtttcaaaaaggatgaacattcagttaagggagaaaagtggccatactcagaagtctaaggtattcatggtaatgataccattacaaagacaaggaaattattatctagttgaaagaataatttaaaaagttgaatttttattttactttgttttaatttgtatgctcaatatttttattcattatttatttactttacatcttggttgcagcttcccctccttcctttgctcctagtccctccctctcacctcagctccccggccatctgcccttcccctctcctcctcagaaaagggaggcctcccctggatagcaaccaactttggcatatcaccttgcagtaagactatacccatcttgtactgagctaggacagccatgctagggacaagggattacctaacatgttgtcagatgcagcccctgctcccgctttaggagtcccatatgaagaccaggccgcacaactactgttgcgtatgtgcagagggcataggtccatcctaggcatgctctctggttggcattgcagttcctgtgagcccctattttgtagatgttagctgattctgtagtttttttttttttctggtgtccttaacccctctagttccacaatccttccttgccctcttccttagggatccccaagctctgcctaatgtttggctgtgggtctgtgcatcagtttccatcagttgctaggctcctatctgcaagtgtagcagactgttgttaatattgtcagggcttggctctctcccatggtatgggtcttaagctggcccagtcattggttttccctcaaattctgctccatcttttacccctgcacatcttgtagtcaggacagatcgtgggtctaaggttttgtgcctgtgttagtgtcctaatctctccattggaagtcttgcctggttacaggagatggccggttcaggctgcgcatccctcattgcttgcagtcttagctagggctactctcaaagatttctaggagtttccattgtccaagtttctagcttgttccgaagatgtgccccctccctagtccagaggtctctctcagtactctctctctcccttccttctccacctaccttattcctgctgttcccattcctacccctcccccagccagtcctctccctttatccatacccagtgtcttttctattttgccttctcagtgagattcaagcatctcctccctaggccctccttgttactgagcttctttgggtctgtggtttatagcatagatacccagtgctttatgacttatacccacttacacttgagtatacaccagtttcgtctttctgggcctgggttacctctctcaggatgatttttttttctatttgtcttagcacacttaccttctcattgcttgtagcaaaagttttatattagttattatttttcttttttttaatctcagagtcttaggaaaacatttatatttctaatgatgagaaaacatatccttgctattaattgtgaggtgttactattttatttgttatttattttatggtattttgtatacatgtatgtctgtgtaccatatgcatgcccagggtccttcgaggccaaaagaggacctcggatcactgtattaaccctatcactggtattacagatggttgtgagggccatatgggtgctgggactcaaacccaggtcctcagcaagagcaacatgtgcccataactgttgagccatctctccaggtccagggttggttattattgaaaggtaaatatttttacttctcttctcttcagtaccatatggttatacagaagtagctagtgttcctgtcgccaggcctggccgacgattgtataatgtgcggaaccccagtgccagccattcggattccgtgttggtgcagattgacgcaacagaaggcaataaggttgtcactcttcgctcacctctgcaggtaatgctgtcagggaatgtgtccccttgtgggtgctaggcagaggtcagtcatttagctgagattgggaggtgtaggacaacttgctcaagcacctctgattattcagaaataagtgccaaagtgaggcagcttctgcttccaccccactctgttcctgtggtttaacttagatgacttgaaaagcagtatttatttatttatttatttatttatttatttatttaagtccacaaacccataagcacttagtatttttctttagagatttgaaacacttaaacatctgaacattactatgtttccctaggcatttcaaactgagactctataattacggttgattgtcaagcaggataacatcccaatctcttactataccaccatcacttgaggctatatttttccagtgagtgtaaggtgtttggaatgatctactttcatgtaaaaaaaaaagaaaaaggaaggcagtttaatctatataaacatttttctttctgctcttgtggttatactacaccttttagtctttctagcattaactccaggcttcagtgtgtagcagtgtgaagaacacttctccccacccaactcatgcattggatgggaacgcatctacactttggaccctgttactttttaagttgttctcagctcccaataagtgtagaccccagtgcagtcaggaaaagatttccatggctctccttatttctttgtcacatggtgtgttggtgtgaggttgtaatgaagaaaacatggctgaaatcttcacgagtggtgcatctttagtggtggcgtagactaactacatacacatatgatgcatagatgatgtggtaatgctgatttggaactgtcacttaaacattaagtttagtgtttatatataatacttagatacctaaatattgttgttagctaacgggaataccttccaatattaagtggaagctttttagatcttaaatgttatgctgctaatgctttccatttaactaatatgcaatttaagaagttatatgtccattccaacagattaaaaaccacttctcaatagcatttatcatctacaaatttgtcaagaatgttaagctgttggagcgcatcggaatagccagacctgaggaagagttccatgttcctctggattcctataggtgcgcacgtctgcatgcacttagcttccaagtggggtggcggtcagcagagctgggaggacttttagggtcttgaggggtggtgggtccagaagggtgagtgtgcatgatagcatagggtgtgtggaaatataccatagtgaagcctgttaatttgtacaattaatgtgggttgttaattacataaataaacaagttttaggaaagaaaaactcatgtattcctagttttatgaagtatatctccgtttttagagagggtagccttgcatatttattgacctagccatacaacagtcatttttagaacacataaaagtttattcttttgattagaaatacatgttatcagctgggcggtggtggtgcacacctttaatctcagcacttgagaggcagaggcaggcagatttctgagtttgaggtcagcctggtcgtctaagtgagttccaggacagccagagctatacagagaaaccctgtctcaacaaaaccaaaaaaaaaaaaaaaaagaaatgcatgttattgaatttacaatataaactcttcatctgatatttaatacttcacaattttctaaaattatatattttattagttatagttattattttatttgtctttacagtcaaaataaaaatatttcaagttgttcttcctctgttggcagctttgtcactttgggtgcgtcctgaactttcttagcagtggttttgacatttgtaagaatattgttccccaccttatagagtcatagcgaagagtctgaggttcgttgcctcaccttccgttgcaggtgccagttgtatgttcagccggctggcggcttggagcagcagtacacacactcctccacctacatttcctggaaggaggagcttcaccgcagcagggaggtcaggtgcatgctgcagtgtcctgcagtggaagtcagcttcctacccctcatcgtgaacacggtcgctctgcccgatgagctgagttacatcggtgcccacggggaagactgggatccagcctacgtcattcatctttaccctcctctcaccttgcggaaccttctcccgtattcgctaagatacttacttgaggtacgtgccttttatttattattattattattgttgttgttgttgttgttgttgttactaaacagagtaaatgcttgttctgttttgtgccattagctctaattggtgtttcatgtttttaagatgtgtttattatagctaacctggcatttttgtttttaagtgtgtatgtgtccatgactgagggcagtgtccaagcagtctggaggaaggtctgtttcctggagctgggagttgccggtggttgttagccactgtgtgggtgctgggagctgaagcagcaggggttgctcctgtcaagttcctctgcaaggccagtaatgctgagccatctctccagccctagcattggtttttagagcagatccaccctgccgagcctgatgttcctggtttctgtaattatagtagctgtgatagaatccccatggtataggaataaaaaggatgaaactgacacccagtagttcaggtggctcatttgataatccagctctactgggaatagctggggtctaagacccagtctttgacatagacacagatttttcccaaaattaaggatggtttgcctatgcgatagcaagaagacactctcactgtggctgtgatagacggtttcctttggagtccctagtaattgctgagaatttctaacatataagcatggctagacttggtggtcagccttccttgggaggatatttagcactgtgtaaaatagagattttgttagtaaagaagtgtgctcagtaaacttggttttgtgtggttgtttttagggaaccgcagaaacccacgagctggcagaaggcagttctgctgacgtccttcactcacggatcagtggcgagatcatagagctcgtcctggtgaaatacctgggcaagaactggaacggacacttccgcatctgtgacacacttcccgagttcttcctcgtgtgcttttcctcagacactgcagaagtgatgacagttgacctgtcagttcacgtcaggcggattggctgccgaatggagctgtctgtctttagtccctattggctaatcaacaaaacttctcgggttctccagtatcgctctgaggagatacatgttaaacacccagctgatttcagggacatcattttattctctttcaagaagaagaacatttttagtaaaaacaaggtatgctctaccaagttaaaataggaaagctactaaatctagagacacaggaatctaaaagcatgctcagctgtgtatgcatcgctcttggtataaattaaatccaaggagactctaaagactgcagagtgtagctggacattaggaactcacagcagcaatcagctgaagcagggctccccgttcttcagggctataagataactgctgtcattgaagtcctgctgcatgcaacagctttattttatccccggctcctgcgctggtgtggcatgtgaaaacactcagcagttgagttgggcctcctgtgtttcctaagccagtctttagagaagaagtcctgtgtccaagcatggtcagtgctcacactttgactttatgtatgctctgccctctaccccgattgctagtcccccaactctacctattttgtctgtcctgttgtatctgttgttcattcttagatactgctcatcgctaatgcattttctgtttacagtgactttacctatcccagtcctgttgcttagatccatgggactcaaatcatctcagtgtccattattgtcacttagatggctttgcaattgtttgcttaatcctgcccttaggttcactttagtgattctggacagagcctgagaatgtgtctgtaaacagtctcagatgcagctgctgtgtgggagcaactctttagagttcaggtcaatatatggagttgcctctgtgtgtcatcttgggctgtccttatgcttgttatgatcttggtggatgggtaggggtaagcagactggcagggcacaggccagtctcttctgcaagactccacctaaatcccagaggaacgccaccatcctctccccagctgcgttttacacctcttgtgtggtgtcataattcttagaacgtgcttccttttatctctgttgagttccatgctcactgaagacggcagctgtgtccctttaaaactaacatgagggacgtgtctaactttagtaattataattaaataattaaagacaaattttcatttattgctaaggtgaatgggatggtcagggttatacttctcttccttggttccctatacccattcagtatggttgtgactgtatttttctgtgtttcaagatactggggaaatttctataagtctagaaatttttctatgaagtaaaattagtttcatcttttaggtttcttacatgatatcatatattctcttgtgtaggtacagctaaaaatttcaaccagtgcctggtccaatggtttctcactggacactgtgggcagttacgggtgtgtgaagtgcccggccaccaatatggaatacctggtaagaggggctgcttcatgacctttggcttcatttgcttccccacacttcagcaaacaagccggctcctaaggagcacagaagtctgaaatcaaaagttctttggaagatggtctgcagatttctattattttatcaaagcagaacttgaatttgtcaaaattcaaatgggttgacttcattggattgggcaactttagtaatattcaagatacattcaaatcttcattccatataccctgtcagttatatcttaaatcttaagcctgactactttgaaaatctgaataatcggatgccacatgacccattttctactgcttcagaattctgattttattggtaatagacaaagcaattaaatttgagcctactaactataaagcacttaacatttagattattaataagtaaaaaaaaaaaaacaacaacaaaccagacagtaaatcgatcattgcgagatgtcattgagcgtgtgatctgtgttttgtagttgatttctggtaaagctggtgtgagaagccagacctttctgtagaggacaataatagaatacagcttttactagttacttatctaagactcctagtttatatattctcagttgcacgtgtgtgacctatgtcttcatttttgacactgaataaagagcaggagaatgaccttgtttgtctccttccctcaggtcggggttagcatcaagatgagcagttttaatctctcacgagtagtcactctgactcccttctgtactgttgcaaataagtcctcgttagacctagaagttggagagattgcttcagatggttccatacccaccaacaaatggcactatgttgcttcgtcagaggtaaatttccctaagatatggctgattcccaaaatgtacagataagcatagacacgcatatgtgttaactgtgacagcaactacaaaagatctttatttcaccctattagaaaataattggtaatattttctattagctcagtctagatggctagcagtcattttctagttatccccatatgactaaaattgatccatgaacttggcaaggcaaatgcagtgaagagtgagatttttaagtacacaggagatggaggcattcttaatcagtaagctcttgagttttttataatgtaattgctataagtacatatagattaatagatttttattctgatgaatgcactgtggtctcatgattatatcagtagggttttctttttgttttgcttttttgtttttgtttttttaaatgggttcttgctgtgtaacctgggctggccttgaacttaggaagctcccgcttcagcttctgcgtgtgccaccacacccagctcgtcagtgttgtcagggtttttactatgaggtatagaggacatttgaacaattttactgatattttattaaataagatctagacttgaaaatttaattacccaatgtgtttaatgaaccgctgtcttatgtcctggtattatacttttttcagtgtattccattttggcctgaaaatttgtctggcaaactttgtgtgagagtggtgggctacgaaggctcttccaagccattcttttacaaccgacaagacaacggcactttattgagcttagaggatctggtaagtcttcagattgcaaaatatcatgtctttgacttttgaaagttgactgaacttttcctgtgagtcatgctatagagatctggagatgccttgtagggcttctgggggcattttaatgacaacacacgtttgtgggagccagagccagtgagaactttagagataagggacgtgtttgtaaagctgattgaacgtgggatgggtccatgcagttgagatacttagccagtaggctgagcacacttcttcttctctgaaacagaatggaggcatcctggtggacataaacactgctgaacactcaactgtcataaccttcagtgactatcatgaggggtctgcgcctgctctgataatgaaccacacacagtgggatgtcctcacgtataaacagaggtatgagacaaggcggggttagatctccactttgctttcaataatccatggtcctttctgggaaatgttacagtttcacaccccagatggcttcagacttgacaacggtggtaagaggcatgtgctgtttattcctaatgcactggcaagttttgacatagtattcaccaaacacatttatatttctacagcaaaacttacgtgtctgatatgaactgggacaaagagatgcttttaaatatcccaatcaactcaaatgggtctttttgccaaatggcttgagagcaaacctgagaaaaatctttgggctttgggtctttataaatttcagaatgcagacaaaggtctgtgaaattatgtattaaacattatccttctcttagtcacttggtaatggcagtgaccccgttcctgtaaatgcgtgtctggaactgtgctgcactgacatagtctgtctgcccaggtgccagaactgctagctacagggcgtattagtgtacttgttttggggctgagttgtatgttattgactaagcaagtttataaggcctttgtggtgtctcaaggccaggacatgctgatcttctgtcaactgtttcagtgggtcacaggaggaactagtattgctgccaggagaaactcgactctttgcctgggcagatcccactggcatcaggaaactcacttggaactatgcagctaactttggggagcatgatctcttaaaggtaccctttgatatggaaatgctgttttcatggaaacaaagtgaattgaaatgttctaagactgttccttttgtgttttatactgcaaaccatttgtatgagtcgtttctctggttgctaagataaagtgcgatgcaaggcatctttaaggaggaaggtgtttgggcctctgatattcatggagctacagtctgtcaaggcagggaagttgacgaagctggccacattgtgtctggagtgatggagcagaggtgaaagccagtgctcagcttgctttttccttttgattcaggctaggactccagctccagcaagcgtgctgtccacatttaggcttatttctctatttctgttcatttatttagaaaatccctcataagcatgtccagagatttgtctccaaggtgattctagatcctatcaaattggcaatcagtataaactattacaggcgaatccctggtcaaccacacagccagccatttacttttataccagccttccatctcttggccctgtgttgtgaccatttaataaggcaaaatgcattcagtcaaccttcacaagaccctctagttgttaagagtcccaacactgtttagaactgtgagtcttggacaatcatgaaaaagttacatatttctaacatactgtggcatagagtaaacatttctagtccaaaaacggggggtgggggcaaagcatggaatgatcatatgcaaacgagagaatccagcagggagaacatgaaatcctgcagctccatgctcagcatctagggcttgtggaggaatcacctgaggtacagagggctgggtcaccctgctctgccagctctgctgcctgcagcagacacagcccctctctatgaagcaccctcacctccatacttgaagcttttctcacagnnnnnnnnnnnnnnnnnnnnnnnnnnnnnnnnnnnnnnnnnnnnnnnnnnnnnnnnnnnnnnnnnnnnnnnnnnnnnnnnnnnnnnnnnnnnnnnnnnnnnnnnnnnnnnnnnnnnnnnnnnnnnnnnnnnnnnnnnnnnnnnnnnnnnnnnnnnnnnnnnnnnnnnnnnnnnnnnnnnnnnnnnnnnnnnnnnnnnnnnnnnnnnnnnnnnnnnnnnnnnnnnnnnnnnnnnnnnnnnnnnnnnnnnnnnnnnnnnnnnnnnnnnnnnnnnnnnnnnnnnnnnnnnnnnnnnnnnnnnnnnnnnnnnnnnnnnnnnnnnnnnnnnnnnnnnnnnnnnnnnnnnnnnnnnnnnnnnnnnnnnnnnnnnnnnnnnnnnnnnnnnnnnnnnnnnnnnnnnnnnnnnnnnnnnnnnnnnnnnnnnnnnnnnnnnnnnnnnnnnnnnnnnnnnnnnnnnnnnnnnnnnnnnnnnnnnnnnnnnnnnnnnnnnnnnnnnnnnnnnnnnnnnnnnnnnnnnnnnnnnnnnnnnnnnnnnnnnnnnnnnnnnnnnnnnnnnnnnnnnnnnnnnnnnnnnnnnnnnnnnnnnnnnnnnnnnnnnnnnnnnnnnnnnnnnnnnnnnnnnnnnnnnnnnnnnnnnnnnnnnnnnnnnnnnnnnnnnnnnnnnnnnnnnnnnnnnnnnnnnnnnnnnnnnnnnnnnnnnnnnnnnnnnnnnnnnnnnnnnnnnnnnnnnnnnnnnnnnnnnnnnnnnnnnnnnnnnnnnnnnnnnnnnnnnnnnnnnnnnnnnnnnnnnnnnnnnnnnnnnnnnnnnnnnnnnnnnnnnnnnnnnnnnnnnnnnnnnnnnnnnnnnnnnnnnnnnnnnnnnnnnnnnnnnnnnnnnnnnnnnnnnnnnnnnnnnnnnnnnnnnnnnnnnnnnnnnnnnnnnnnnnnnnnnnnnnnnnnnnnnnnnnnnnnnnnnnnnnnnnnnnnnnnnnnnnnnnnnnnnnnnnnnnnnnnnnnnnnnnnnnnnnnnnnnnnnnnnnnnnnnnnnnnnnnnnnnnnnnnnnnnnnnnnnnnnnnnnnnnnnnnnnnnnnnnnnnnnnnnnnnnnnnnnnnnnnnnnnnnnnnnnnnnnnnnnnnnnnnnnnnnnnnnnnnnnnnnnnnnnnnnnnnnnnnnnnnnnnnnnnnnnnnnnnnnnnnnnnnnnnnnnnnnnnnnnnnnnnnnnnnnnnnnnnnnnnnnnnnnnnnnnnnnnnnnnnnnnnnnnnnnnnnnnnnnnnnnnnnnnnnnnnnnnnnnnnnnnnnnnnnnnnnnnnnnnnnnnnnnnnnnnnnnnnnnnnnnnnnnnnnnnnnnnnnnnnnnnnnnnnnnnnnnnnnnnnnnnnnnnnnnnnnnnnnnnnnnnnnnnnnnataaattagaaaaaaatgtttataagggaagcaagacacacacacacacacacacacacacacacacactgtaatatgtatttgtgggttcaggaacacactgatgggtcattgaaggttaatgtttacagacgatagcatgttgcggagcacacttctaggagagttcatattccaatatcacacacaacattgcaggaacaacactgagtggagtcaggcccttgtggcagcatctgggttccttgttacagatctctgaggaaaggggcaggttccccaagtgaacagctgctaagttctctgataccccagcaggcagcctggagagtgtgggaaaggaaatgtgtgggcaccggtaactacaggtactgtgaaatgtcagagccctgtaaactcactccctaagtgagacatctaactgagagcttgttagctagaaattcgctgtgcctaccagcgtgtgagaagggagagtccagccaatccctccatacttgagcatcagtttcctctggattttaagtttcgtggttagttattatattacttattattagttagttattatgtcatttattattagccattatggctatttagaactttcacacccattaattcctctggttcagtttctactgagaaaacacttgtatggttctcttgtctgctaatcacagtgagtttggtaaaagacttatttagaggacagttttcccccaacagaacaacaatctctttagatgccctaaacatgagggtgctttcccaggtttcatggtttttatcaggaagagctgctggatttatgcaacacataggaaacatcattagctagtctcagtaagctaggtaaattaaaatattatagattcatatttatttcataaacggttttctttaatacacctcagtaaagtatgaatgataagtcacagtgaaaccactgcctgtttatgtatagcttttgatttcaaaccaaagtgtttaatattgaaaagatggggaacacccaaataatattttatgagaagtgaagttatatgaggttcacagtgcacagcccaggagtggttggggccactatttattgttgcacatgtatgaggttcacagtgcacagcccaggagtggtttatttattgtcacgcatgtgtagctgctttctcgctgctgctctgtgcactcaaatcacaatgaatattgtcttgctatattgcttatttatttattcttactctggatacccatcgtgtgaaaacaggaagaatgggctttgaatgtctctctttgagggcatagtagaatacacattatttttgacaaagcattaacttattgcatcgtgcaattatcgctgtgccagaagaatatggaagatactgccacttccaaactaagtgtgcatgcaggtgagcaggggctggaaaagttagaaagctgtaagacagaatgtctcaccacaacacaagttttcacaaagatcaccatgaatgaggctatagccaaagtcagcttctgagggactcctttgctaagtctagcaaggaaagccttttgtagttgatcctgtctgattgtggcagctaaagaaatatgtgcagagatgataaattacctaagcccattagtgtttctgtgaggacagttttacatggacttgaggacattcagaacaacatcagtcagctacaaaggctggcgacacagatggctctccagctctgaggagtcagctggtgctcccttgcactcaagcattgtgtatctgagaagtcagggcagagcttaaaatggatggtgagaatcttttcaaatggggaagataaattctgcatgactgagctgaagtctaagatgcattatgactgcgagcacaatcttagttggtcaagttcatagaattttgaaagtatgaagcacttcataccttctgttctttgtgttatgtgtcagcagatgcttggtaggaaatacttgatctgttgggtgttgtcaaactcagtctgtgctttaaccccatcgttcctgtggcttgatggcagtagaagctcattgtcctgtgtcttaccacatagcagttgaatgacgtagcactagaagtctctcactgaactcttcaaattcagagccctgagtaaatagtcacccccatgcactgttctcccactcttaactagaactggaagccatcttgctcaaggaactggccatgtttctgtatgaactttaattgagaattagaaagccagatgacagtgcttatgtgcaaaatttatgttgccacaaactcagttttaagataggtaatgcttaaatcataagccatgtcagaccgttgatgtgtatttcccatgctgtcttaagttaaaaggtctctaatgcccatatgtttggagaagacatattttatatcataagccttcagttggaacaacattttttctgatcttggtgtgtgtgtgtatgaagaaaatgtttgtatttcaaaatctatctgtccaattgaggaactttcttgtaatctgattattcacaatgtgctgatgggcagaaaggcaagtattaacacagtagtctcttagaattttataaacccctcaggggtagtaaataaaataagaataaaatagatgcagtgttctcatagattgatgtcagtacttggcagcaaatgtctataatgatgttataaaatagttgttataaatcagcacaaatatagggctggagagatggagcagaggttgagagtatgtactgttcttgtagagaatttgaagtagagtctcaaaataagcacccatgttgggtgactcaaaaaaaaaactcttatgtttctgatgccctcctttggcttccatgagcactacacgaaaggacacacatgcgcacgcacacgcgcacacacacacgcacacacacacacacacacacacagttgcataaacacaaatcttcatttttaaaattccacttgaaaaattcacacctgattttgagaatcaggaacaataactatgtaaaatgttggcttattcacaagaattttttaaatagacatctttagttttttttaatattttaagtttcattagttaaaaattttatggaagctttttttcttttcttcccttgacatggtcaatgtacaatctctgtggtcctgtacaaaaacagtcattggcatgatggatgccagtgtgctgccatgagagatatttcccctagctttattcttcatgctccctcgaaggcaggtgagattggctgttctaaaaggatctcttgcatcaatgtcattttcacaggatgttgatatctagataaataggaaattcaacggcagttctgtgaaaatacatactcatagcttaatttcctttgtgaattattttagctcaggtgttgtttgggagatgaagccaaaacagaaatggaagccgtttagtcagaagcagataatgtccctggagcaggcctattcgaagcgccttgcatcacaagaccgcggctgggtcaagctggacagtaattttgaggtatggctgtggttctacagttttataggtactttggtctagatagcagtgagtaaagttttaatgtcctatgaacagaaactaacttaaaagtgagtacacctgtatttattggagcgattgcctaagtacttaattcaaacatagttacaaaactatttacctttgtcttttttctgtgttaattgattgttcttcctgctgatcggttctatggaacttgttttcagtaagctcatggggacattatgactgttgaaactttttttcgtattttgagtaacaccttcacattgatgaatatagatcttgagattacatatttcatggatagaaaatgtacataaactttgccctgtgatttcatccagtgtgaatgattgctggaattaggttaaacatctacaaagaaaggtgtgctctccgtggtcacacagagtaaaaacaccgtcttcttggcttcaagaagactccagaggcttccctgcatttctgggctcttctgctctaggcctgagctttggctgctcttgcttttgctgtctgagggcagggtttgcacaaacccctagtcctgtgccttcctacacccatcagtgttcgtgggctggacgataatgtttatgccattaagtcatacgaaaccaaaaccatttgcttaaggattacctggaattgggctagagagatggctcagcagttaagatcactggctgctctcgcagaggactgaggtttgattcccaccacccaatggcagctaacaatgtccattaactccagtttcagggcatttagtgccctcttctggccttacaggcacttcatgcagtggcattcatacacatgcaggcaaaacactcatacacataatgtaaaaagaaaataagtaaaatctataaaatgaatggtctggaattctgtattactattaattttttctataaagcattttaagtacaatttcagaattccagtttcctaataagtgttagaaagacagtgcttctgcttgcgcgggctaaaggtgcatattacccaaaaagcccttctgattggtgcagtgacttgttcatttagtgtctgaacttgggaggctggagcgggaggattgctgtgagtttgaggacagcctaggctatagagtgagtccaatctcaaagaagacagaataaagtaagtggccttcatgagacagggacatgaccatgttgtgctcactcgatgcaaggtcatgagtgtgatgttttaaatgccattaaatagctgctgttgacaccagctcatcacaaaagcgcttttgtttcttacaggtcaattttgacaaagtgccgatggaaatgcgcctccctatccggtgccctattaaacgggacttcttatcagggattcaggttgagtttaagcagtctcctcaccagagaagcctaagggcccggttgtattggctccaggtaactaagtaggtctgtgtgacctcttaggaaaatatgaaagtgagacctaatttactctgtgatttgtgttaaattattatgctctggggtgcagcttgaaaagagtatgagagtatgtgtagtgtgcataaggccttggtccagtcctcaaaaagaagttgtaaatatatacatacatatatatatatatatatatatgtgtgtgtgtgtgtgttagaatagcatatatatgtatatatatatatatatgtatatatatatatatatatatatatacacatatatataaatatttgtgtgtctgtgtgttcactgtcctaatccaaggcactacatactattaagagtgtcagtgtgaccacaggcctgcctagggtgttttcttcactattacattgttattaaatgctcctttcagtttgacatgagagtcctaattaatatttttctgtcattcttcatggcaaagagcaggactttattgggccgagtttgggggtgattgcttgctagtcctctctctccgccctccctcccctcttccacctcccttcattgtctttccacctctaccatgttttatttagaatactctttgtccttcctactttttctaatcttctgttcacttgccacttgcgttttatttgagcccgccgcatcagactgtcacattccagcgtgcagaagtctgctgcacacagtcagtgcctcatggggcacataacgttgtttttcataaagtgaagctgctaatggcacctcctgtgcatgcagatgctgagttattgtctacagccgagtgtttatgttggaattattcgaacctgacccaatggtttgtgcttccaggtcgataatcagttaccaggcacaatgttcccagttgtatttcaccctgtggctcctcctaagtccattgctttggattcaggtaaagaagaaaatatcgacacactcttcattaaaacgttagaagctctcagtctgactagtgcaaaggctgactttgttcttctctgttgtgtttcttttagagcccaagcctttcatcgatgtgagtgtaattacgaggttcaatgagtacagtaaagtcttacagttcaagtgagtagaggtctaccgtttggctccaggcatagaaacaagggtcaattttgaaaattaatttgttgtttgtttgtttgtttgggagtggcttctgtacaaaatctcttttcccaaccagtatattaatctaaactattgggctggtgaacttttaaatacttaaacgtattttaaagtagtctatatgtacttggcgattcagaattattttaatcatctctaacgccaattagaatataagtatacagatccatgagctgtgttctttaaagcaggcatcttgaactttaagaatcagatggtatatgctatgttttctaatgtatcacctctcctgtgacatgataaatgtgggcatttggggctctcagtgtgataagtgctaatacagcagtattactttagttgtggttttctctgtgataaataagtctcacaatggcaagatgttgctgaaaggaccctgatacagctgtctcttgtgaggctatgccggggcctagcaaacagagaagtggatgctcacaatcagttattggatggatcacagggcccccaatggagaagctagagaaagtacacaagttgctaaaggggtctgcaaccctataggtggaacaacaatatgaactaaccagtaccccccggagctcgtgtctctagctgcatatgtatcagaagatggcctagtcggccatcagtggaaagagaggcccattggtcttgcaaactttatatgccccagtacaggggaacgccagggccaagaagtggggagtgggggggnnnnnnnnnnnnnnnnnnnnttggaaatgtaaatgaagaaaatacctaattaataaaaaaataagtctcagcttaaggaggcttcaatcttattagcataatgttaagacacaaagaagtaagaactgtagcttttgggtgaaaaaaatcacttataaccacttttgttattgttgttttgcatttttttgtttgtttgtttgtttgtttgtttgtcctggctgtcctcaaactaacagagctatgcctgttcttgccttctgagtactgggctcaaataatgtgcaccactactcctagcttaaaacatatatatatatatatactctcgcacaggtattttatggttctcatccaggaaatggccttaaaggttgatcagggcttccttggagctgttatttcactgtttactcccacaactgatcctgaggctgaaagaaaacgggtaacaatatttatttcttgagccaaacataaagaaaaaattagccatttttgaactaattcttggagtgagggggaaaaaattaaccatttaattttttttttccagacaaagttaatccaacaagatattgatgctctcaacacagagttgatggagtcttcaatgactgatatgtcaatcctgagtttctttgaacatttccacatttcccctgttaaggtttgtttttagaaggtagagtgtaattgcctctgagctttctgagggtctgcaaaccagtgtagcttcatttgttgcatcaggtatttggtgaggtttcatttgactaatggtgacaattgagacagtgctctgtgacatatgtgcagccataatcccacagaggactcaccagagcatgttctccagtgctgaattaatagcccctgtgctcaggaagaagctgacagcagtgtttcttaattaagcgtggagcgctcaccagtgtttaatgtttgggttgcactttgtagcagccaccgctgtctaaacagagctgcgatgggcgccctccccggcacgggaaagcgctgaagcgggcgttatgctgttgacgcggtgctttttgatccttccggagtgtgattgtaactaagagggtggaaaattgaatacctttcacttccctgccttcgtactttgtgaacccatttccttccccccttttgttgttcttttcagctcatacagggaagaacggcttcttagtaaatacacaaatgcaatcagctagagtgcactgtacttgcataatggaccatattgacaattccaatattaatgttcctttgcagtctcaggaactgaccacagcactgaccacagccatagacttggttatagtcaccagtctgttcagctaacaggacgtttaaggcagaattgctattcaagccattttattagtttggagatatccggcatttccagaacactaagtctaacattgatttatgtaatagattatatacagtttcattctataaggatagatcagttgttattattgggattaatgtttttaacacaagttttcagagtttgttattgttggttgtttttctaaatgcactgcctgaactagatagaagtagatgcttagccattgccttgcctggtagagtgtttttgtgcccgttggtgttttttttactctcagatggtgatcccattttgcaaaggattccaatcttttccatctggacacagaggtgtttattcactttgggagtagaactttaatcttagatcagactaatttgtattttatggaaagacgagcagaaatcaaatgcacacatgatgaatctgttctgtagcatgtgagcagggcagggcatgggcacctttggtggtgcaggaagatctggtcctacacagctttgttcaggctttcctatattgagtgctgtttttctttcagttgcatctgagtctgtctttgggatccggaggtgaggaatcagacaaagagaaacaggaaatgattgcaattcattctgtgaacctgctgttgaagagcataggtgccactctgacggacgtggatgacctcatattcaagtaagggccttgcttaagtgcatgctgggagccactccttctcaaagtgcttcagggcattgactgtctccattggtgcagccttggcttagagagtcttcctacctgacttgaagagtgtgctctgtgtctagttatactcagggctttaagacaagttacaactttggttgtgtgtgaatacttaataaaaacctaattgttttgtacagtcattcaacctatgaattgactgtattttactattgagttctagtaagaaatatgtagcaggggagtgagattccagtgtgatctgtagccaagtgtagaaaggagaaccccgtgttgtacattacaggaggctgtgtgtgcatgccagctgtatcttcactccatagctgtctgctgaactgaatagtgcacaaaagtattggaataagtggttacctgagagaaaaactccttgtagatcattaccatctcacatgtgtgctaagtttctgagaaaacaagggaaaaaagtataaaatccaaactgaaagacttgaaaaagctaagggctggggagaaagctcagctgtcaaagtgcttgaggcctgagctcagtccccagaacacacacacagtccaggtgtggtggtatgcacttgtggtctcagtgccgttgaggtggaggcagctgggtccctgggtctcactgtgcagccaggtccagtctacttggccatttccagaccaatatgagagcctgtctcagaaaggctggcagagaacaccttggggtagcaggcaaggttgacctctaggctctacgtgcttgtgtgcacatatgcatgtgtgcccaaaggcacaggagtaccacaccacaaacattcacacacacaaaagcaaacatataagtagaagttgaatggaataaatctctgattagtgttgtctttctcttttagaagcagtgacaaaattccagtgagaaatactagataggactgactacataaaagttaaatacttgggctatagagttagctcagtgagagagagaggtggggggaagtcaaggtcttcagttcaatctctccaagggaaaagaaaacaacccagacacttttctcaaaaggaccctctgggatagaatgggcaggcaggacagggaaatggttcttagttgcagtgttaaacactgagagtaagggtcagggacagagcagcctcagactgtggaggcttcccaaacaatggaagtggcaggcaggtattagagatgtccaccattgttatcagaaatacatgcaaataaaatgaagcattcaaaacaagataactaacactagagatggatgactttaagtaatgggtactttaaaaatgctagtgtatgaatggaaactttgtgcgtatgcatacatatcatacacacatatgcagacacacacacacaaagatgcctttagggattttgtcattgattactcagtgaggggacttattgtaaaatgatcctgaaataaagccaaacaggtatgcctactctgcacctggcagtcccctttgttataacaaccttgggtacatctgaaggcaggaatcactctcttcacgactgctgtgtaatgcaatgctctacatgcgctcaaatgcttaccgggaagctcgagtaaaatgtgaatgtgtaattcataatgttgagtttaaaagtgacatacagaatgttttaggttttgtggatgcatagaaaagaatcaaaagtgaacagcaataagaaagaacttaaaatttaccatgtcacttttattgtgatatttatttgtgtgtgtgtgagcatgtgtgcatggatgtatgcgtgtgcactgctgagtgcagaaacaggaggtcatacagtgctcttgcactgcgctacatctccagctctgtgactgacttttaaaaaccacttttttctttcttcattcgtaagactcttacatgagaattatcgattttagaataatttcattactataatatttagctgtcaactataaattgtcacaggaattagctgctacaggcagtgtctttgtactcagagcatcactgtactggccttaactctttgccttgtctctgccaggcttgcttactatgagattcgctatcagttttacaagagagatcagctcatgtggagtgttgtcagacactacagtgaacaggtaacttcctcctacagtagcttgggaacacacttcataaagcaccataaaacgggtacatgagagcatagcatggatggaaatggttatgtgaccgacttcagagtcttatcgctctgtgactttgttgctgttgttggctgtttaagacatgctctcctgctgtccaggctggccttgaacttacagtcttcctttctcagtctccctagacctgggttcacaggcatgtccaccacactcagcattgcttagtggtttctttttattttttaattaattaactaattaattaattttttacacttcatattttatcccctcccctccgactgttccacatcccatacctcctccccagccccctatttccacgtggatgttcccacctcctacctcatcagacctctaaactccctggggcctccagtctcttgagggttaggtgtgtcatctctgaatgatcacagaccctgcaatcctctgctgtatgtgtgttgggggcctcatatcagctggtgtatactgcttgtttggtggtcaagtgtttgagagatctcgggggtccagattagttgaggctgctggtcctcttacagggtcacccttctcctcagcttctttcagcctttccctaattcaataggggtcacctgcttctgtccattggttgggtgcaaatatctgcctctgactctttcagctgcttgttgggtcttctgaagtacagtcaagctaggtccttttttgtgggtgctccatagcctcagtaatggtgtcaggccttgggacctccccttgagctggatcccactttgggcctgtccctggactttcatttcctcaagctcctctccatttccatccctgtaattctttcagacaggaacaattatgggtcagagttgtgactgtggggtggccctccctccctcatttgatgccctgtcttcctgctggaggtgggctctataagtttcctctccctactgtctggtatctctctggagtctctcacctcccaggtctctgtatgactacattctggagggttcccccaacttcctccctccccaggttgcctgttttcattctttgtgttggccctcagggcttcagtccttttccctcacccaataccagatctggttcccctctcttcctcacttcttacccccaccccatctactttccctcccaggcccctccctccctccccacttgtgattgctttcttctctctcccaagtgggactgaggcgacctcacttaggtacttcagcttgttgacctttttaagttctgtgaactgtatcttgagtagtctgtacttctttttttggctaatatccacttaagtgtctaatttcagttcctttttaataaaaatgagttttgttttagatcaactttcctttatttcattatgatatgaaggctcaaaggtaattttaggctcgtcttacgatgagctgattttttttaaatgcagcctagatgttcatatcaagaagggatagcaagacattcttagtaattctaacttttccctcttgaacatttttcatgtgcatataatgtttgattaaatccatgtccccatttccttccaccccctttccctcccctatgtgttctcgtcctccctccctccctcnnnnnnnnnnnnnnnnnnnnttgtacaggaccacagagattgtacattgaccatgtcaagggaagaaaagaaaaaaagcttccataaaatttttaactaatgaaacttaaaatattaaaaaaaactaaagatgtctatttaaaaaattcttgtgaataagccaacattttacatagttattgttcctgattctcaaaatcaggtgtgaatttttcaagtggaattttaaaaatgaagatttgtgtttatgcaactgtgtgtgtgtgtgtgtgtgtgtgcgtgtgtgtgtgcgcgtgtgcgtgcgcatgtgtgtcctttcgtgtagtgctcatggaagccaaaggagggcatcagaacctccctccctccctccctccctcccctcttctttctcctcttccccctctccttctccctcttcatctttttcagcccattgagtccacttagtgctgcctttgcacgtggctgtgggattgtcccctgaagctgggtagcctctcaatgaccacatccctcatgaaaattgactcctttccctccccagtagccatcagttgctaaagctttgagtgatgtgtgggacttcaaggtcccttacctatccctgctgggttttggctggggcgatgtatgggtcttgtgcatggaggtaatttctatttctttagcttgtcttctgttacacagtttaaagtgttttcctccaggctcctttcccttttcagggagactttaccacgttaggaaatgtaaaacgcaggctaggggattgcaagagggtttctaagccagctcctccccgccagcaggtactgtgtggattgggtaataggcaaggagggtgcagtgtcacagccactcaggtggaactgcagggctgcctttgttgttccatcttctgctgggagattgttcttgtggtgcatgcgaacaataggtccaaacaaatacaaatttttcccataattactaatgattccctatataatttaataacagtacaatattaacgctaatgagcattgaattttatattcattactatgcatactcttcatgcaaggtcattgtgatctttcactttgcagcagggaaggccaacagtaaagaccaggtgacttgtctgaggccacgtgactactaaatggcaattgttgatttaagacacacatgttgtgatatcaggtgtggaggtgcttgctggtggccattgcacacgttgtcccttaatgttttccctgtcatcttctcttcccattgcttcctaaatgttcttcagtgttcaggaaggacttatctattcttttttttctctttagttcttgaagcagatgtatgtgcttgtattgggcttagacgtgcttggaaacccatttggactgattaggggcctgtccgaaggagttgaagcactgttctatgagcccttccaggtactggttgaaacaaatgtcctgctttctagtgatatgtaattgtatttaactgtatatggcaatggaataatgttcaaataataatgacaaaaatcagcttcaggtttttatttaaaatacttaaatgacattgaaagattgttttacattcaaatgagcacatctactgttgatcttgggcagtaaactgtgcccgagttttcctggtattccatgtagttataagtgtctgagtgctgggtagattacagacagttttgctgctgtggaaaggactgggaggggtccaaggacctgactgtcctccttggcgctctcatctcacatgcccacctttgcttcaagagtccagaggcccaaagtcataagggttttgtttggaaggaccacgtggagagagtaagagggagaagagagccagacagagtagagtcggtcctgtagcacagctggctttggtatgccagtacagtgcactgggaagccagcggcatgctgcaatcatagccagtgattgacacctgtactatgttagtcttgtagaatctgctaatattgtgctaatattgaaactacttctaagcacagttggtataaatctatgagtatttaagagatagcatgaaaatggtttggtcctagtctttatggttttttatacttttgttgtcttcatgagatagtcaaaatgctggattaaaagtcttacacttattaaagtttaatactaactttttctctttttggggggatcagggtgctgtccaaggtcctgaagaatttgctgaaggattagtgattggggtgagaagtctcgttggacacacagtaggtgcgtatgatcaacgtttgtccgtgtgtgtaattacggctctaaagtgtgttgtttatggaaagcaagtggttatatgtagtaagagggagttcaccttcctaataaacctttaaagtccatttccatcatttcaactgggtgtgactgcaacagtgactcctgggctctcagtgttcacaggttggatgagtgtgctttaaaaattgtgttacttctcttggtagcataattcatcgtaatttttcatttgcatatgagaaggaactgtgtaggtacttgttgaaagcaggtgcatgctgtacctgcgcgcagtgacgactgacttcttggtctgctctgtaggtggtgcagcgggagtcgtatctcgaatcactgggtcagttgggaaaggcctggccgcaattacaatggacaaagagtatcagcagaagagaagagaggagatggggcgacagcctaaagattttggagacagtcttgccagaggagggaagggcttcctgcgtgtgagtctcctgttgagcttcaggaatctgtcatagatgcactgaagctattagactaatgacatatgctttgtggctctttctactgtgaatttcctatgatttaatgtttgtaaagatcaatgtgtgcacttacatgtgcatgttgttcactaaacagaaaaacagaaaaaaaaaattagtgtgtctatggcgacctctagtggttggtttagtgttacgcacctttgggttgctggagacttgatgactgatttctcttgcagggagttgttggtggggtgactggaataataacaaagcccgtggaaggtaggtagaaaacacttctctcctgcacagaggggaagggtacgtgcatgccagatgctattgatactccgtgcttgactgagaggagtacggactaaactttatattacagttgtgattatcagtgtgttatctcagagaggttaaatagtgactgactcagattttgaatgatgttctcatcaaggccagaaggaaattaaattctctgaggccctcagtagcaactgacatgtgctaggtacatatacatatgcatatatatttttatatatattttaaaaatataaaggtatacacacacacacacacacacacacacacacacacaaataccttttaaaaattaaaaggcagtgttggaggagtagtgtaggcacatgttgcatgccccaactttaaagcatcataaagctacactgattatgcttacgtggcatgatactggcctgaagttggacatgtaggtcaatgaacccttgcaagtactggatctctgaggtgggcaccaagctgactccagcagtggcttcagcagatggaggaagtgccagaggctgagagtagaagtcagaacttagaagcagacacagcagctagtgccgtggtcagacaggagcccttttggacaggacaccaaggcatgggtgacaaaagacaaggcagataagttggactcaagatttaagtttttatgtggtggacgattccatgaggaaatgaaaaggatagtttgccaaaattaaaacaaagcttatgccttggaaaatattactgtaaaaagaaaaaaaataaacaaaatgagataaaagttttgtactatatttggtaagagatttattgcttgactataggaagaacttgtacaagctaataataagaagataacccagattaaaacaggcaaaggatctgaatagaccattcctcaacaaagatatgcaagtgtacactttagtcatcagggtagtgtggatggaaatcgaaacatcagttaggatgactcatgtaagtcagggtgtggggcaattggaatctccatggctgctggtaggagcatgtggtagcacagccacctataggagaacattctgcctgtccctctacagttggacatagaaatgctgtgtgtcagcaaggtaccctaaagtgctgaaagcagacattcagtcttacatgctaatgctcatagcttgatttttcatcataactaaaacataaaaagatccgtctatccccaatgcatgaataaataaaatatggcatatctgctcaatggaatattattcagccataaacagaaaccaagcagtggtacatgcacagtgcagatgaattcagactgcatggttctgagtaaacaaagcccagtctcgggagaccattcggtggaagctgcgcaagtgtggcgtccagaggaaagcagactgggtgacggctaagtctgaagaggcgggaacgggggagaggaggaggtgtcccgatgggttcagatgaggactggggaactagagtgacagacagtaggcacagagtggattcctgagatgacaaggattttctaaaattgattgtgatgatgttgtacagttcttaatagaccgaaagcatttaatttgtctagtgggacattttatagtgtgtgaacagaatttttaataaattgagttgtttttaatgtactgcctggatatcctaatggttgtaatggaatgagtgagtgagtgttctctgctaagttctctgatctccctggcacgtacgttaggctgtatcagtcctctcaactctgtgtgggcttcagtatcctggagatctgtgtccacccttggcataagcatacgctgaagtggtctggcccagggatctgtgctttgagagcaaccatgtcatcacattaagatgaaatgtagcgtccccagacacctaaatacttgtggtttttgagttggcttgggtttttgttgagttcagacttgcttatttaaactgctattatatatttgttgtctttggttttgtaaaggtgccaagaaggagggcgctgccggcttctttaaaggaattggaaaagggcttgtgggtgccgtggctcgtccaactggcgggatcatagatatggctagcagcaccttccaaggcattcagaggtaagggcatccatacactggtgtgggcatcctgtattaacctgctcttaaggctcttggatctaattggaagtcatggcagctttatgaggccaagaactgtggaaaggagtaaaaaagaaatgagtcttaaagccccgttcgttttcatttcattccatttcatatccaggcactgatagacagcttggctgcatagtgtctgtgacctttccgagtctgactcttttttttttttttccattttttattaggtatttagctcatttacatttccaatgctataccaaaagtcccccatacccacccacccccactcccttacccacccacnnnnnnnnnnnnnnnnnnnnnnnnnnnnnnnnnnnnnnnnnnnnnnnnnnnnnnnnnnnnnnnnnnnnnnnnnnnnnnnnnnnnnnnnnnnnnnnnnnnnnnnnnnnnnnnnnnnnnnnnnnnnnnnnnnnnnnnnnnnnnnnnnnnnnnnnnnnnnnnnnnnnnnnnnnnnnnnnnnnnnnnnnnnnnnnnnnnnnnnnnnnnnnnnnnnnnnnnnnnnnnnnnnnnnnnnnnnnnnnnnnnnnnnnnnnnnnnnnnnnnnnnnnnnnnnnnnnnnnnnnnnnnnnnnnnnnnnnnnnnnnnnnnnnnnnnnnnnnnnnnnnnnnnnnnnnnnnnnnnnnnnnnnnnnnnnnnnnnnnnnnnnnnnnnnnnnnnnnnnnnnnnnnnnnnnnnnnnnnnnnnnnnnnnnnnnnnnnnnnnnnnnnnnnnnnnnnnnnnnnnnnnnnnnnnnnnnnnnnnnnnnnnnnnnnnnnnnnnnnnnnnnnnnnnnnnnnnnnnnnnnnnnnnnnnnnnnnnnnnnnnnnnnnnnnnnnnnnnnnnnnnnnnnnnnnnnnnnnnnnnnnnnnnnnnnnnnnnnnnnnnnnnnnnnnnnnnnnnnnnnnnnnnnnnnnnnnnnnnnnnnnnnnnnnnnnnnnnnnnnnnnnnnnnnnnnnnnnnnnnnnnnnnnnnnnnnnnnnnnnnnnnnnnnnnnnnnnnnnnnnnnnnnnnnnnnnnnnnnnnnnnnnnnnnnnnnnnnnnnnnnnnnnnnnnnnnnnnnnnnnnnnnnnnnnnnnnnnnnnnnnnnnnnnnnnnnnnnnnnnnnnnnnnnnnnnnnnnnnnnnnnnnnnnnnnnnnnnnnnnnnnnnnnnnnnnnnnnnnnnnnnnnnnnnnnnnnnnnnnnnnnnnnnnnnnnnnnnnnnnnnnnnnnnnnnnnnnnnnnnnnnnnnnnnnnnnnnnnnnnnnnnnnnnnnnnnnnnnnnnnnnnnnnnnnnnnnnnnnnnnnnnnnnnnnnnnnnnnnnnnnnnnnnnnnnnnnnnnnnnnnnnnnnnnnnnnnnnnnnnnnnnnnnnnnnnnnnnnnnnnnnnnnnnnnnnnnnnnnnnnnnnnnnnnnnnnnnnnnnnnnnnnnnnnnnnnnnnnnnnnnnnnnnnnnnnnnnnnnnnnnnnnnnnnnnnnnnnnnnnnnnnnnnnnnnnnnnnnnnnnnnnnnnnnnnnnnnnnnnnnnnnnnnnnnnnnnnnnnnnnnnnnnnnnnnnnnnnnnnnnnnnnnnnnnnnnnnnnnnnnnnnnnnnnnnnnnnnnnnnnnnnnnnnnnnnnnnnnnnnnnnnnnnnnnnnnnnnnnnnnnnnnnnnnnnnnnnnnnnnnnnnnnnnnnnnnnnnnnnnnnnnnnnnnnnnnnnnnnnnnnnnnnnnnnnnnnnnnnnnnnnnnnnnnnnnnnnnnnnnnnnnnnnnnnnnnnnnnnnnnnnnnnnnnnnnnnnnnnnnnnnnnnnnnnnnnnnnnnnnnnnnnnnnnnnnnnnnnnnnnnnnnnnnnnnnnnnnnnnnnnnnnnnnnnnnnnnnnnnnnnnnnnnnnnnnnnnnnnnnnnnnnnnnnnnnnnnnnnnnnnnnnnnnnnnnnnnnnnnnnnnnnnnnnnnnnnnnnnnnnnnnnnnnnnnnnnnnnnnnnnnnnnnnnnnnnnnnnnnnnnnnnnnnnnnnnnnnnnnnnnnnnnnnnnnnnnnnnnnnnnnnnnnnnnnnnnnnnnnnnnnnnnnnnnnnnnnnnnnnnnnnnnnnnnnnnnnnnnnnnnnnnnnnnnnnnnnnnnnnnnnnnnnnnnnnnnnnnnnnnnnnnnnnnnnnnnnnnnnnnnnnnnnnnnnnnnnnnnnnnnnnnnnnnnnnnnnnnnnnnnnnnnnnnnnnnnnnnnnnnnnnnnnnnnnnnnnnnnnnnnnnnnnnnnnnnnnnnnnnnnnnnnnnnnnnnnnnnnnnnnnnnnnnnnnnnnnnnnnnnnnnnnnnnnnnnnnnnnnnnnnnnnnnnnnnnnnnnnnnnnnnnnnnnnnnnnnnnnnnnnnnnnnnnnnnnnnnnnnnnnnnnnnnnnnnnnnnnnnnnnnnnnnnnnnnnnnnnnnnnnnnnnnnnnnnnnnnnnnnnnnnnnnnnnnnnnnnnnnnnnnnnnnnnnnnnnnnnnnnnnnnnnnnnnnnnnnnnnnnnnnnnnnnnnnnnnnnnnnnnnnnnnnnnnnnnnnnnnnnnnnnnnnnnnnnnnnnnnnnnnnnnnnnnnnnnnnnnnnnnnnnnnnnnnnnnnnnnnnnnnnnnnnnnnnnnnnnnnnnnnnnnnnnnnnnnntgctttttctgcatctaacgagagatcatgtggtttttgtctttgagtttgtttatataatggattacattgatggattttcgtatattaaaccatccctgcattcctggaataaaacctacttggtcaggatagatgattgctttaatatgttcttggattcggttagcaagaattttattgaggatttttgcatcgatattcataagagaaattggtctgaagttctctatctttgttgaatctttctgtggtttaggtatcagagtaatagtggcttcataaaatgagttgggtagagtaccttctacttctattttgtgaaatagtttgtgcagaactggaattagatcttctttgaaggtctgatagaactctgcactaaacccgtctggtcctgggctttttttggctgggagactattaataactgcttctatttctttaggtgatatgggactgtttagatggtcaacttgatcctgactcaactttggtacttgggatctgtctagaaatttgtccatttcgtccaggttttccagttttgttaagtataacctttggtagaaggatctgatggtgttttggatttcttcaggatctgttgttatgtctcccttttcatttctgattttgttaattaggattttgtccctgtgccctttagtaagtctagctaagggtttatctatcttgttgattttctcaaagaaccaactcctcgtttggttaattctttgaatagttctttttgtttccacttggttgatttcacccctgagtttgattatttcctgccgtctactcctcttgggtgaatttgcttcctttttttctagagcttttagatgtgttgtcaagctgctagtatgtgctctctcccgtttcttcttggaggcactcagagctatgagtttccctcttagaaatgctttcattgtgtcccaaaggtttgggtacgttgtggcttcattttcattaaactctaaaaattctttaatttctttctttattccttccttgaccaaggtatcattgagaagagtgttgttcagtttccacgtgaatgttggctttccattatttatgttgttattgaagatcagtcttaggccatggtggtctgataggatacatgggacaatttcaatatttttgtatctgttgaggcctgttttgtgaccaattatatggtcaattttggagaaggtcccatgaggtgctgagaagaaggtatatccttttgttttaggataaaatgttctgtagatatctgttaggtccatttgtttcataacttctgttagtttcactgtgtccctgtttagtttctgtttccacgatctgtcccttgatgaaagtggtgtgttgaggtctcccactattattgtgtgaggtgcaatgtgtgctttgagctttactaaaatgtctttaatgaatgtggctgcccttgcatttggagcgtagatattcagaattgagagttcctcttggaggattttacctttgatgagtatgaagtgtccctccttgtcttttttgataactttgggttggaagtcgattttatccgatattagaatggctactccagcttgtttcttcagaccatttgcttcgaaaattgttttccagcctttcactctgaggtagtgtctgtctttttccctgagatgggtttcctgtaagcagcagaatgttgggtcctgtttgtgtagccagtctgttagtctatgtctttttattggggaattgagaccattgatattaaggaaaagtaattgttgcttccttttatttttgttgttagagttggcattctgttcttgtgactgtcttctttttttttgttgagggattactttcttgtttgttctagggcgtgatttccgtccttgtattgcttcttttctgttattatcctttgaagggctggattcgtggaaagatattgtgtgaatttggttttgtcgtggaatactttggtttctccatctatggtaattgagagtttggccgggtatagtagctggcatttgtgttctcttagtgtctgtataacatctgtccaggctcttctggctttcatagtctctggtgaaaagtctggtgtaattctgataggccttcctttatatgttacttgacctttctcccttactgcttttaatattctatctttatttagtgcatttgttgttctgattattatgtgtcgggaggaatttcttttctggtccagtctatttggagttctgtaggcttcttgtatgatcatgggcatctctttctttatgtttgggaagttttcttcaattattttgttgaagatgtttgctggtcctttgagttgaaaatcttcattctcatccactcctattatgcgtaggtttggtcttctcattgtgtcctggatttcctggatgttttgagttaggatccttttgcattttgtattttctttgactgttgtgtcgatgttctctatggaatcttctgcacctgagattctctcttccatttcttgtattctgttgctgatgctcgcatctatggttccagatctctttcctagggtttctatctccagtgttgcctcgctttgggttttctttactgtgtttacttccctttttagttctagtatggttttgttcatttccattacctgtttggatgtgttttcctgtttttctttaaggacttctacctgtttggctgtgttttcctgcttttctttaagggcctgtaactctttagcagtgctctcctgtaattctttaagtgacttatgaaagtccttcttgatgtcctctatcatcatcatgaaaaatgcttttaaatctgggtctagattttcggttgtgttggggtgcccaggactaggtggggtgggagtgctgcgttctgatgatggtgagtggtcttgatttctgttagtaggattcttacgtttgtctttcgccatctggtaatctctgaaactagctgttatagttgtctctgttaagagcttgtacttcaggtgactctgttagcctctataagcagacctggagggtagcactctccttggtttcagtgggtagagtattctctgcaggaaagctctcttcttgccgggaaggtacccagatatctggtgttcaaaccggactcctggcagaagttgtgttccactcactagaggtcttaggatcccgtggggaatcctttgtgggcccttgcgggtgtcaggcgactctgctggcaaggaagcccggggctcgagtggagcggaaggggcttttgccctgggtcaggcccgggtagtctgcttccctatgtaccgcagtctcaggttccacgcgattggattggggccggcgctgtgttccactcaccagaggtcttaggatcccgtggggaatcctgtatgggcccttgcgggtgtcaggcaactctgctggccaggaagccctgggctggagtggagcggaaggggccccgagtctgactctttctttcttcaaggaaagagtggatgcttaggcatggctttaataattcttttcttccctttgaacgagtcttagaaattattgatagtttttactcatttatctgtgagtttgatcaacatcaatttgtctgattttgaaagatgctcacatattctctgttatgttattcagggtagcagaatccactgaggaggtgtccagcctccgtccacctcgtctgatccacgaagacggtatcattcgtccatatgacaggcaggaatcggagggttccgacctattagaggtaaatgctggtcttcgtggctgtgaaatggaaagatgctagggcagagatgtcatgggtgatttttaaggtacctgatcgtgactctctgaaggagtcttcatggtttatagagtagaatttgtttttctgtagggtggcctggcatgttgaggggagctaattggtaactcatttttctgtacaggacaggagcaaggcacaagggcttttctgtgcagaaaagactgccttggaagcagctgtaggctgcttgaccatccctgaggcagcttgcttagttaccatgcttcattctggcttcttgctttgtgcctagtgtttctcttgctgctaccctttgctctcagccacaatacccgactcctcttactgtgagaatctaaaattattctgctaaacagaactagaggagagaaaaagagattatacatttatagtcttgttaaatgttttaaaagaattattgtgttttggcattttgtcttggctatagtttcattatacttaaataatatgcatatacttaaattgctatccttccgtgactggctttccctcagcagagacttactaatatttccatactttatgataaagatgacttagttattcttagcttctggttttcattatatgtggtcacattttatctttttgcatgcttctaactttcttctctttctttttcctgcctacacagcaagagatggggacacaggagtaaatgtccccgtactgcctgactccatccttaaaacgcaaatcatactactattgtttgacggtgtgtgaatcagactgtgtgtaaatcacggccgattttaaagaaatctctttataactctcccttccacctgagcttttcagtatggtggctcatagttgaaaattgtgacttcatggaattctacacagggctaagcaatgggtgtaaaagatgccatggtgcaggaaataacttcgctggtttgggattgggagttcaaaggatattgagcccagagcacatcttttgctaccgttttggaaattgtaaggcttgtctacggggttgtccgtgtacccgtcagatgaggttggaaaggataggtctgtgcagtgaatgtccgtgtttctgaatctcgatgatggaattatgcagagttctgctccacacagtaccccaaacttactcaagtcatgggactattaacctgggaggtagcattttaataactaatatgtcatttctctgagcttgtccttggacctgagatggtcttggcataggaattgtagtagaatgtttcttccgtatatatttttttcttttttaattcagttatgaagtaatttatgtggtctgcacccctaacattcatcagggattccttttgaaaactgagccccattgctggttacgcttacctcataattaactggttttaattattgtaagtagagttagtaacagaacatgtaattaggcagattacctctgtggcagctgaatgtatagatatctctccttttataaacaaactcttagaggtctgggagatggcacagttgataaagtcttcctagcaagcacaaagacctgaatttagatctccagtactcacacatggtgggtggcgcgtgtctgtccagtgctggatggagctggggtcaggaagcaggcagaacctggggtttgttgacggccagctcacttacttttagcgagtaccagattttgtgagagatcttgctcgaaatcagagcaaagcaaaagatagtaatggaggaagacacctgataatgaactcagtcctccacacgttcacaaatgcccacatgcatatgccacacgtaacatgtgtgcaccccttcacacacacctgtacaaatggacatgtgcatgcggcattgacacttcataaatttaatcctcagagagttttcttgatgtgaacaaaataactataaattagcctttaaaccccagctaattcccaaagtaaatgatattttaatttctatttaaaataataatgagaatgtttaattttgtgctttaacagtgtcttatctatcaactaatattgaagccaaagtagaaacttgatcactagtatatatttgaagttaatgaaactgttaaatacaagctacaagctttttttttttttttctttttctttttggacagggtctactatgtagccctggttggctcggaactctctgtatagaccaggctggccttgacttcacagataccctcctgattatacctctcatgtgctgggattaaaggtgtgcatttatgtttttaaatgcatagttataaaaagcagttagttgaacactttatgtctaaagcaaacactgtaaagagaatataactgatgtccaaggccagacagcacttcatggacagaagggatgacctgcatccttgtctggggcacagctcaggtaaagcagcagccacaaggcttgggtttgaaccctggcattgccacgtttccctcaaaacaagacttctgtgctcatgggaccacatatagaaaaatatgtaaatattaatcgtagccaaaatacaaaaccaagaagcttctagggcctgggtgacgggggatgggcacggtgtccccgtgcgtgcagcttccgagagagtcaagcacggtctgtgacttcagatgctgcagctccttgtgtgagagacacaagttttagttttcctgaatatattccagttttaccaagactttgtgatcctctgaaatctgtgtctttttagttacttattatgttttattgtatttttttagctccttagtgattcttgtggtttctctttttataaatgtatgtattaagcacaaaggttattttagctaagactatagtcatcttgtgtggcctttaagtttttgttacaatgtcagacaaccctttaaactgtaatctactgtaataattttggacgaaatagaaggtaattgttgtagggtttggtgacttgtagctgagcttagctcctgcagctctccccatcttgctgtggccagagctgaggagggagcacattctgattgtgtggactctgttggattgagccctttagggagtcagtggaacactgacctgtaaatgtcacagagtcctggagtattagagtttatcttccttgctcttactgtaatactgacttactctaaataatttatttattttgctgatgattcttaacggtcatacaagatttaatgcagtcttctttgctttcctacctagttttgtttttccgtgtttggaaatgttttactaacactttaacccttgcctgtctacccactgaggtagtcttgcattgtgtaatccgttcttccctccgacattggttcttgtaccgtactcagtgatattattaactctgtgataaataccactgtacatttgcattttgccttttcatgccgtgtgctgtttccttagaattaatttggaagggatgaaaaagaatgggtacaggatcctttcctttaccgaaacgttactaaatccctcatgttaagttttgtgttggtcagtctggtctcctgttaccctcagtgattgtatctcgctctgaatttcagagtctagtgtgtctttaatagcactggaaagatgttctcagtgtatcctggtgataagttgtacatgagggctcttggcgggtgaagcacagcttgataaggactggacatgtgaggagagaagcaggctcccccagcttctgtggcttaaacctgccgccatgtgtattcctagatcgagctaaagccactacattattacagcatgctgtcctgttttcctgttttctctgaaggaactgagggtttgatggtaaaacactgttgagaattcacagggtggactgtgaaaccagtgcccatctcccctccgcgatgcactctgaagatgccgcttcagctctgggaattgtcttcctcgtttatggcttttgcaatccttgtttgtggcttgtttttgtaattagcaaggaatggctagggactgacatatttttaagatgtgggttccattgcctgcagcacaaatgaaaaatgtacttaagattcacagtcacaacaccaagcgtgctttcctggctgtgtgtatgctgactgtatgatcctgatgccgtaggggtgcgttctcctcagtcatgcagcgggacagccgtgttcactcagtgtgtctatcttctgtattttatgcccatgtatcatttgaactttgatcactcatcataggtgatatcaatgatatttattagtatttgttataaaactgtatttgtttctaatgtgtattgactaatttaagtcagtaattttaagatacttgaaaaagaaaataaatattttattggctacaatttatagttgggttatttgtgcattaggaatatactctgcaaatattttgaaatgctagaaattctttgtgtccataattgtctattgtagtaagaaatataatttcatacaaagatgtttcttttcaacttgtgtttaatctacatgacccaatacagagagacagcaaagcccttgcagacttaccattatgtggtgtataaccctgtccaaatcagtggttgggtcttagcttttaagaaatgattttgtatgtgtctgtgtgtgtgcctgggcgcatgcctatgcaccatgtgcatgactgagcctctggaggtcagcagagggcgtcagagtccttggacctggagctacaggagatggtgagctgtagtgtggatgctgcaaatggaacctgtgctctctgaaagagcagtcggtgctcttatccactgagccatttctccagccccggggcctcagcttttaagaagggtcatatacttctctcaaaggaacctgaagaaaaaggtgaaccatcctgtgaaaagaatttcaaaaccactatttctgaatttcacgtctatgccaccccaagtccttgccagggaaggaccctttaaggaccagtgcgacattaatgtggcggttttatgttaccatatttatatattcttaatgaagatgtgtgattgtttctagctgataactttgaatttttaagttactaagaacacaatatttttcaccagatgctcacttggtaagcattccgtccatctgtgcaatagtgaatccttaactgtattgtaaataggctgttttcctgctgcagatgccaagatgcagtattctggttttgtttctagcgtaccttttcctaaccttgattatcatcggctaccatacaaattatatttaaatacatgtagttcccaagtcttaactcgtgcttctttttcagaatcacatcaagaagttggagggcgaggcctaccagttccactgtgccgttcccgggaacaagagggctgtccttatgatcacaaacaggtatctccggccttccagatgcatccagctgtgctcatactcacaggaggactttcagaggccacagtgacagatgggcaggggcagggtgaccatttgcatatgtcagagacacacagctctggctagctctctgactgcacgtgctccaagccccttgttctggcgatgcagaagctcggcccagcttggctttgggctcattcaggagcggctgaggacacagtgagcggggccttcctcttgcagtgaggacactgtaaggagccacttccaatagaagaaggcagggcactttcccttgtaaggttttatgtgggttattggcagatcccttttcaggatggtggtgttctgtgtgccatcctagttccttctgagtgttttggaaatagcaaacaccttctctagagaaaagggatttgtgctaaaatatcaaacttaacatcctgggatttaccctagaaataaacttatcttcagatatctactgtagatcaataattttcaaagtgctgttttgtaggattaaagcagattatgtagagcaggcacactctgctcagtgttctttctctctctcctttacgtcccccttcctccccaatctgtctctttctgcccccctccctcctccctccctttccctctaatgtatccatcccatccacctgagttttggaaaccaaacccaaggtgtaatggttgctaagctagtgctctcccaccgagctgcaaccccagctcctccctattcgatttaaatgtacctggacaagtaagaaaagctgaatgaagtacagaatctagacattgaaatgagcctttctaaagaggatacctataaggaagggttattcaatcactgtattggtccattagttgggatgtgaatacgggctatggagatggcttgccagacaagagcacttgctgctctcgtgggggcccaggttcagttctcagcacccacctttggctgatgcctctgacatctacggggatctgcacttaagtgcacacacccatactcacacacacacttcaaaataaacctttgaaaaatccgagtggaggtcttggagactccataccagagtgtgtcacctaggagatgacaagatttaaactctgatagttggagcaggagagagaatagagacttcttatggtaggagaatgtgtaactgtagtgctcaggagaagagagaacttaaaaaatgcacaaaacagtcagttgtctttggtacaaggctttgctatctgatactgcactgggcttagggtcaggtgtgtggatgctcatcagagacaggctagacctgtgtgtgggtattgaaatgtcacaagaaggaagtcaccgctggctcttgctcggcaaggatcaagggtcctatagctatccgtcccaaagaattccaaaattctcatggtaccccttgagaaacagcatcaggagcctgctttaattcccctgcccattgatcaccaggttcattcaggtctgccttcctgaacacccaagtttagccctttcttctctctcctttcagccactgtcatagtgaggctgtcaatggttcctcttcaggctttgcagcaacctcggtcttaatattctattccaggccctgagccccagctctctctgcttatcgccagaagtatgtctaaaataaccttcctatagtgtctgattacccataagttaaagttgtaatttaaagaggacactagtatcattctaaaattagacattaaggtgatttttctcaccaaggcatgtatttggtattccagccacagacctccacactccccaacaagcatttccttctgcttggggttgatggcacaggctgttgtccctgctgcttgggaaagcaagtcaagaggacagcaaggtcaagacctgtctgagggccagcctgggcaaagttgtgagacctgcctcaagatgcatgggagcatagctgaaacagtgcttgcctagcgtttgcaaggccccgagttctattctgagtaacacaccattgctttgcacacttagtctcccagagtgtctgtattgtctaaactgtcactgcctccataaagagaacaccctctatttgtggttaacttgaactcaccctccatgtcatcagtgcagcctttctgtttccagcgctctgagtttgtggtggcatgtgttgtctgtgtgttcattttcccttctgggcatctccctctcaggcagagtcctcacctttattctttcctcccacacctatgtggtgtttgaattcacaaatatacatttctagttttgctgtctttagtggagacttaaaatcaggtatagttacatcaattattaatctgactctgactagaaaatcagtcttggtgtcctttaaggattatgctattttttcaattgctattcagtaaaacgagacatttctcctgtgatatacattagcgttaaaatgttcaagtctggtatttattagtaggtccaaagtgagtctttgctgacatttgggcttgtgacatttcctgtatgatctgtcgtggctggaaggcgtaagtgactgacaggaaagagcaattaggaagattcccagcaaatcgctcctcttcaggggcttctgctcgcctcccagatgagggtccatcctgcacctcttgtgtttcaaatgtgattttcctcatttgttttgctggtttaaaaccaaaaacagcattcctgaattctgcaagattgacagaaggggcatttttaaagtccatttttgtttggtagagagttatattgtattccatttaacatttacatagacttttttttttaaatgaagagcatacttttctgtgagtgaattttaaaatttttattattatatttttattttttacagttcagctgtccccccccttattttccattattttcccttcagttcttttagataggaacaattctgggtcaaaatttttgactgtgggatggtaacccaattcctccacttgatgccctgtcttttcactggagttccctcttctcactgttgggcatttcatctaaggcctctccctttgattcctgagagcctctcacctcccaggtctctgatactttctagagggtcctcccacctctccctatacctcaaggttgcatatttccattcattctgctggccctcagagcttctgtcatgtctcaacccccatacctgattatgttcccccctttccctctacccactcctacctaggtccctccctccctctgtcttctgtgattgctttcttctcccttccaagtgggattgcagcatccttacttgggcccctctgcttgttaaccttattgagttatatggattgtatcctaggtatactgtactttttttggctaatatccatttatgagtatataccatgcatgtccttttgggtttgagttacctcactcaggatgatattttctagttttatccatttgcctggaaaactcatgatgttcttaatggctgagtagtattccattgtgtaaatgaaccacattttcttccttccttccttccttccttccttccttccttccttccttccttccttccttccttcctttctttctttctttttttttttttctgaaacagggtttctctgtatagccctggctatcctggaactcactttgtagactaggctggccttgaactcagaaatctacctgcctctgcctcctgagtgctgggattaaaggcgtgcgccaccacgcccgacaaaccacattttctgtatccattcttctgttgtggagcttcttggttgtttctagcttctggctatcacagacaaggccactatgaacatagaggagcacatgcccctatggcatggtggggcatctttttgggcatattcccaatagtggtatagctgggtcttcagatagatctatttccagttttctgagaaacctgatttccagagtggttgtaccagtttacaatcccaccagcagtggaggagtgttcctctgatgactaaggactttgaaggtttctttaggtgcttcttagccattgagattcctttgttgtgaatcctctgtttagctccgtacttcattttttgattgggttgtttggtttttggaagttagattcttgaattctttatatattttggatattagcctctattggatatggggttagtgaagattttttttcttaatctgtaggttgtcaatttgtcctattgactgtgccttttaaaatgtttatttttgagagtttcatgcatatatacagtgaaatatgatcatatatgccccatttcttccttccaactgcccttgtcccttctcccaacgtgcctcttccttaacttcatgtccccatcttcctcttcctttttattttctaagtctaatttttactgatagtgtgcacatgaatatctgctatccagtggagcacgggaaacctaccagcagccacactgagaacgattgagtctcgctccagtgcaggagcccctcagtggggcctggagaccgtgtgctgggatgtgggctagcttgatcttgtacacatctcctaatggtagccacagaggctttgagttcctaagggcagtagccgtgtcatgtccaaaagacagcatttcccagaatcctctcaccctccagctgctatattctttctgcctgctcctccctgagccctgggacggggaagttgataaatgtttcccatccctctttgttcttcactcagcttccgaccctcagcaccctatgggggtcagcttttgttgtttactaaacacacacagagtaaagatggagctgatccgcggctgtgcttgttttcttttccaacacaggcgagcactgtttataaaggaggttgaaatcctaggccatatgtctgtggactggcagtgtctgtttgaagattttgtatgtcctcctgaagtcagtgaaaatctgctgaagatttcagttaaggtgagaaaatatgaatcagaccttcagagccagagagactcagtcagtgctttctggctgcctcacagttacagaggcaggccgagtggaggagcagggccatccctgtgctggcgcatgctaaaccgtaaacaaacaactaatttgtgtaactcttttatcttctgacatagagtatagtatcaattgattcgccagaattgcttctgccttttggtaaaattaagcattagtgagtaggagtttttgtttcttcttatgtacacccattttgcaacaaccttagacatttctacagatattctttttgctaagcaattggtaggctatgtgcctcagggaaagtaaatgttccgtctaaggtcatcggacgctgagcaggcagaagcacttgctgtgcaagcatggcccctgagttcgatccccagaacccccatggaagcaaatgaccctgcagagttgtcttgacctcagctcacacctgcttgtcaacacatcacacacacaaaccgttaaaaatagattaggtctaaatagccccatttatgatctggtgcacacagaatgtgaatataacttacatgtgtgtgacctgtgtctttcctcccatcctttgctaaggacggactttgcattgcatagtatggggttagcagaagttataccttgtctttgctgggttctcaggcttacccaccattcacacacacacacacacacacacacacacacacacctctctagatgtatttttatctctcttaagaaaacatacacagttggcattgtaaatatggcattgtgtataatacctttgttttgcttaaacaacaatgatattatcctctttattaaaactctccaaacaacattacccacagattttgaatgggtttaaagtgattgtcctttacttctctcattatagacatgtatagacaagagaatcccgagtcagcctgcccgtgtgtgctctggtgcagattgtcacagcacagggcgccctggcaggaaacagtgccctggagctggggcagactgtccgtgcatagtttacagtcccctggttaccacctgtctctcagctacttttcccttgctgcagtaagaaagcaccacgagaaggcaatgtataaaagaaacagtctaactggggctttgggtttcagaagatgggatccatgattctggagcaaaggcctggtgactagaacagctgagccacatacattgtgatctgaaagtgggaggtagagagaaagcgagactgggcgtggtgcagtcttttgaaccctcaaagcctgtccccaacaaggccacacccctaatccttcccaaatagttccaccagggaggtaccaaatattcaaacatataagcctatgggagccaatctcattcaaactactgcagcatcttggcttcacatcagtggtaagaattgactcggtgtatttttacattgtataagaattttatctatcaggagatgaagggggggccttttggttcgccacttgtctgtcagctgtcatgtgttgtcacagtgtgatcctgtaggctatttattgttgcctgctgaagcctttattttacacaaataggtctataaattatgactctagtgtgcagccactttccttgtagcaaggtgatttatttcacagcatacttgcattccagtggtgtagtgcttatgaaataagttgacatttaagcatccagttaaagattaaggtattttttttctaaagaataattcctttcctgtcattatttcttttaaaaccaggagcagggtctgttccataaaaaagacagtgccaatataggccatcttcggaaaatttacctgaaggatcccatcacagccaaggtaaagagttcattttaacaaccccctcaaggattttaatgggaaaacctttacaagctggggtaacagttagtcgccattacctctcacatactctctactactggtaattttgagttaatgctcctgtgaatggtgggctggaaactcaccagagtggaaggtcatggttcacattgcgtgggtgggtggtacagcctgagagagtcatggttcatacctcatgtgaggtggtagcctggtccttgtccacacctgcatggagactccgggtctctgccttcccctaccctcggggagccagaggtcatctttgcagttgataaccctgcttttccttccagagggcctttgatgccattgagagcgcccagtcagcaaggcagcagcagaagctcatgaggcagtcgtcagtgaaactcctcaggccccaggggccgtcttgaccatggattctacaaggcttctgagggggaagcggccgctgcagggcctgctcaagagaacatttccagcgattccttggctctgggttttggtgttttgttttgttttttgtttttgactcttaattttgagtcttgggaattctgcatatattaggaatctactgctacacgtttaggtcagacctcaaagaaataccacttcagcttggagagacttattcattaatattaaaattgtgaagcaaagagtggtgggcttgtttttaattaatctttactgaagagaggagattttaaaatgagtagtattctttgaaaggttttattcagacaaatagtggacactgacatttgtttaaaagtaatttgtgcaataattgaactaagagaacacttttggtaagccagtcagttgactgaagaaatgtatctaaaggagaggcagtgcattttctatgttcattttatgaaaatgttatttttcttctaataggatgagttttacacgagtgctttttcttctcctttctatctagtctcagaccatgggcggtctggcagctttggtgggcagccctgcaccgctgtctgtagcgaggcacccaccggctgtcagagcatgagcacaacgacggattcttgagaaatagaaactgagaaattgcactatgagctcctcagcattcaggaatatataaaatacaatatttttttatatttccagagatctatttt

SEQ ID NO: 2303 - DNA, 11160 bp, Mus musculus
tccggctcctccctctcccgcctcctggtccccgccatggtgctggagtcggtggtcgctgacttgctgaaccgcttcctaggggactacgtggagaacctgaacaagtcccagctaaagctggggatctggggcggtaatgtggctttggataatctgcagataaaagaaaatgctctgagtgaattggacgttcctttcaaagtcaaggctggccagattgataaattaactttgaagattccttggaaaaacctttatggagaagcagtcgttgccacgctagaaggattatacctgcttgtggtccctggagcaagtattaagtatgacgctgagaaagaagaaaaatccttgcaggatattaaacagaaagaactttgccgaattgaagaagcccttcagaaagcagcagagaaaggtgcacactcaggggagttcatgtatggcttggaaaacttgctttacaaggacgtcaagcctggacgtaagcgtaaaaagcacaaaaaacattttaagaaacgttttaaaggtcttgatcgctccaaagataagcccaaagaagcaaaaaaggatacatttctggaaaaatggcaactcaagtaataaaaaatgttcaagtaaaattacagacattcttctttggtagatcacggatccagaaaggccgctttcatttggtgtcaccctgagagaatttagtctgttgacaactaatgaacactggactccatgcattttaaatgaagcagaaaaaattatatataagctcgtgaagctggacagtctcagcgcctattggaacgttggctgctgcatgtcttaccgtggatcgagggagcacatcttgttttccagccaatatcagcctctgcaaaactctacatgaatcctggtgcagaatcagagctcaaaacccccaaactcgatgggaacgtagaggtgcagaatattgccatcgagctgacgaagcctcaggacttggagaagagtctagatgtttttaacataattttagtgagacaacaagcacaagttgaggtcattcattctgggcagaagttaaggaaaaagtctgcggaggcaggagagaaacgtggctggtttagtgggttttggggcaagaaggaatctaagaagagagatgaggagtcttcagtccctgagaccatcgatgaccttatgactccagaggagaaggacaagctcttcactgccattgggtacagtgagaatgcctacaacttggctttgcccaagcagtatgtggcccatatactgactctgaagttggtcagcacctctattataataagagaaaacaggaatgttccagaaatcttgagagtccagataattggcttgggtacccaagtctcccagcgaccaggagcacaagcattgaagatagaagcaaaattagaacactggtacgtcacaggtttgcgacaacaagacattgtgccatcactggtggcttccattggtgacactacatcgtccttgctcaaaattgagtttgaaaccaaccctgagaacagtcctgctgaccagactctgattgttcagtcacagcccgtggaggtcatctatgacgctaaaactatcaatgctgttgttgaattctttcagtcaaataaggggttggatcttgagcaaattacatcagctaccttgatgaaactggaagagattaaagagaggacagctacaggacttacgcatatcattgagactcggaaagttctcgatttaaggataaatctgaagccttcttacctgataattccacagacaggttttcaccatgaaaagtcaaatcttctcattttagattttggtacttttcagctcaacagtaaagaccaaggcgcacagaagactgctaatgcatcccttgaggaaataatagacaaggcgtatgacaagtttgatgtggagataaggagtgtgcagttgctctttgcaaaagcagaggaaaattggaaaaagtgtagattccagcatccatcgactatgcatatactgcagccaatggatattcacgttgagttggccaaggcaatggtggagaaggatgttagaatggccaaatttaaagtgtcaggaggactgcctttgatgcatgtgaggatttctgaccagaagataaaggatgcgctgtgtttgattaacagtatacctttgccacagaagtcatccacaccgtctccagagagacaggtagcctcaattcctgttctttcaggagggacgaaagcacttcttgggacttcattgttgctagatggagtggaatcagagtctgacgaggagttctttgatgctgaggacggagactcgcaggctgctagaactgtcaaagcctcagaactgaaaaaagctgctgaagttccaaatgaggagctggttagtctcctgctcaagtttgagattaaagaggtggttttggaactcactaaacaacagaaagaagaagagacaatcctagtatttaatgtcactcagttagggacagaagcaacaatgaggacatttgacctgactgcggtgtcctatttgaggaaaatcagcttggattaccatgacattaaaggatccagaaagaagccaattcacttgattagctcttcagacagacctggactagatcttttaaaagtggagtacattaaggttgataggaatgggcctagttttcaaactacttttgagaaaactgaacaaactgttaaggtggccttttcatctttgaatctgttgctacaaacgcaagctcttctgtcttctcttaactacttgacaactgtcatcccatcagacagtcagaacacgggtgtggccaaggaggtgcaggccatgcctgagaaacaaaagaactctcccctgcagaaagtgatggtcccctccagagatagtgacgtgattggctttaggctgtttgccaaactgaatgctttctgtgtcactgtctgtgatgagaagagcaatattgctgaaatcaagatacaaggccttgattcttctctttctcttcaatcaaagaagcagtcactttttgccaggctggaaaacattattgtcacagatgttgatcccaaaacaattcataagaaagctgtatccatagttgggaatgaagtttttcgctttaacctggatttgtatccggatgctactgaaggggattcctacactgacatgtccacagtggatggcgtggtggcactgcacgtcggctgtattcagattgtctaccttcataaattccttatgtcgctgctgagcttcctgaacaatttccaggtggccaaggaggcgctgagtgcagccactgcccaggctgcggaaaaggcggccacgagcgtgaaggatctcgcccagagaagcttccgtgtttctgtcgatattgatttgaaagcacccgtcattgtcattccgcagtcctctctctccaccaatgctgttgtggtggatcttgggctaattagagttcacaatcggttcagtctggtgtctggagaagacactgcaaatcctccagtgattgacaaaatggaggtgcagctcacgaaactgaaactctctaggacagcaatccagccaggcacctcccaccctgatattcagctgttgcacccaattaacttggagttttttgtaagtcggaatctagctgcaaattggtaccataaggtgcctgttgtagaaattaaagggcgtcttgactcaatgaatgttagtctaaatcaagaggatcttaatcttctgtttagaatattggcagaaaatcttggcgaggccactgaagacttggataaagggaaacctagaatacaagagagaggtgaaacaaaagcctgccgagaagtctctacaccgcaggatgtgcacaccacacaaggtgtgccagcagccagagtggaggagaccagacccgtagacatcattaatgtactgttgaactttgaaattaaagaggttgtggttactttgatgaaaaaagcagaaaggaaaggaagcccctttcatgaactaaagatcctgcatcttgggatggaagctaaagtaaaagcccacgacatgactgctgcagcctacctcaggaacattagcatgcggtgtttccacttccctgattctaaaggggagcctctgcgcattgtcaacacctctgatgtgtctgatgggaccctcctgaaactgctgttcatcaaggcagacagtgatggaccagactttaagaccattcatgataacaccaaacagaagctgaaggtttcgttttcatccttggacttggtacttcatttggaagctttactttccctcatggattttttgtcatctgctatcccatcctctgactcttcttcctctgagaaggaacctgagctaaagccacttgtgggggagtccagaagtcttgccatcagagccgtgcccagctcttatgagggtgacgcgtttgatttgaagatcacagctgaattaaatgcctttaacatcttcatttgtgatcagaagagtaacatagcagaaattaaaatacatggaatggatgcctcgatttctgtgaagccaaagcagactgatgtatttgccagacttaagaatatcatagttatgaatgttgattcactgtccattcacaaaaaggctgtctctattttgggagatgaagtcttccggttccagatgagtctgtatccagatgccacagaaggagagaattatggcgatatgtctaaagtggatggcagacttagtctcaaagtgggctgtattcagattgtctatgttcataaattctttatgtctctcttgagcttcctcaacaatttccaagctgccaaggaagccttgagcacagccacagtccaggctgcagagagagctgcgtccagtgtgaaggacctggcccagaagagcttccggcttctgatggacatcgatttgaaagcacctgtcatcactattccccagtcttctgtgtcaccaaatgtcgttatagcagatctgggcttgatcagagttgagaacaagtttagcttggtttctgtggagcagctcgcgcttcccccagtggccgacgagatgagcatccagctcacccagctgaagcttgccagaactgttttacaagctgattcacctcagcatgacgttgaaatcttaaaacctgtgaacatgcttttatgcatacagcggaatttgtcagcagcgtggtacacacagattccaggcatggagataaaaggcgaacttaaacctatgcaggttgctctcagtcaagatgacttgacagttttaatgaaaattttgctggaaaaccttggggaagcttcttcacaaccaagccctacacagtatgcacaggaggctgcacgggtgaagagagatactcggagtgggcctgactatcttaaagaacaagagctggcggacccaaagccgcccggggaccagaccgtcactcttcagtttgatttccactttgactctctttccatcatcctttacaacagtgatagcagccagatgttcaaggatgggtctatgaatgtcagccttaaacttaagacgtgcacgcttgatgatctccgagaaggaatcgagagagccacctccaggtttgtcagctcagagtttgtcgtgcagagtttcaggatgattgacaaaaagaatgaccaggacaacaacagctctatgattgatataagttatagccaggataaaaatggaagccaggtcgatgctgtccttgacaagctgtacgtgtgtgccagtgtggagtttctgatgaccgtggctgatttcttcatcaaagctatgcctcagagtccagaaaacatagccaaagaaatacagattccatcaagacagactgccgcgggaagagtcaagatggagaaagatgactctgtgaggccaaatatgactctgaaggccatgatcacagacccagaagtggtgtttgttgccagcctgactaaggccgatgctcccgctctcacggcctccttccagtgcaacctctccctctcaacgtccaaactggagcagatgatggaagcttctgtgagagacctgaaagtgctggcctgccctttcctcagagaaaggagaggaaagagcatcaccacgatctcacctataatccttaatactgtaatgacaatcatggctgctatgtctccaaagaccaaagaagatgaatggaaagacactcctaaggagacagacaatctctgggctgtcaaatctattactgattataactcttggtttctcggggttgacatggcaacagaagtaacagaaaattttagagactctgaacatccatcgatagaggaaaattgtgtggttgctgtggagtcagttcaagtcaccttagagtgtggcctagggcatcgcactgtgcccctgttattggcagagtccaagttctctggaaatattaaaaactggacttctctaatggccgctgctgctgacatgacactagaggttcactattacaatgaaactcatgccgtctgggagccactgattgaaagagtggaggggaacaagccgtggagcttaaagcttaatgtaaagaaaaacccgatccaggataaaagtttgatgccaggagatgactttattcctgagccacaaacagcagttcatatttcttcaggagctacgatgaatatcacaatatccaaaagctgtcttaatgttttcagcaatttagcaaaaggtttctccgagggagcggcttctacgtttgactactctctgaaagacagggctccttttacagtcaaaaatgcgctgggtgtccccatgaaggtgcagcccaatcgtaacctcaaggtcatgggctcccctgagaagagtgacatttatgacgtgggcgctggtcagcacttggagctggactacgccagcctggaaccttcgcgccaagggaagctgtccatcctgagccggcaggagagctcgctcttcacactgacctttgtaccatatggttatacagaagtagctagtgttcctgtcgccaggcctggccgacgattgtataatgtgcggaaccccagtgccagccattcggattccgtgttggtgcagattgacgcaacagaaggcaataaggttgtcactcttcgctcacctctgcagattaaaaaccacttctcaatagcatttatcatctacaaatttgtcaagaatgttaagctgttggagcgcatcggaatagccagacctgaggaagagttccatgttcctctggattcctataggtgccagttgtatgttcagccggctggcggcttggagcagcagtacacacactcctccacctacatttcctggaaggaggagcttcaccgcagcagggaggtcaggtgcatgctgcagtgtcctgcagtggaagtcagcttcctacccctcatcgtgaacacggtcgctctgcccgatgagctgagttacatcggtgcccacggggaagactgggatccagcctacgtcattcatctttaccctcctctcaccttgcggaaccttctcccgtattcgctaagatacttacttgagggaaccgcagaaacccacgagctggcagaaggcagttctgctgacgtccttcactcacggatcagtggcgagatcatagagctcgtcctggtgaaatacctgggcaagaactggaacggacacttccgcatctgtgacacacttcccgagttcttcctcgtgtgcttttcctcagacactgcagaagtgatgacagttgacctgtcagttcacgtcaggcggattggctgccgaatggagctgtctgtctttagtccctattggctaatcaacaaaacttctcgggttctccagtatcgctctgaggagatacatgttaaacacccagctgatttcagggacatcattttattctctttcaagaagaagaacatttttagtaaaaacaaggtacagctaaaaatttcaaccagtgcctggtccaatggtttctcactggacactgtgggcagttacgggtgtgtgaagtgcccggccaccaatatggaatacctggtcggggttagcatcaagatgagcagttttaatctctcacgagtagtcactctgactcccttctgtactgttgcaaataagtcctcgttagacctagaagttggagagattgcttcagatggttccatacccaccaacaaatggcactatgttgcttcgtcagagtgtattccattttggcctgaaaatttgtctggcaaactttgtgtgagagtggtgggctacgaaggctcttccaagccattcttttacaaccgacaagacaacggcactttattgagcttagaggatctgaatggaggcatcctggtggacataaacactgctgaacactcaactgtcataaccttcagtgactatcatgaggggtctgcgcctgctctgataatgaaccacacacagtgggatgtcctcacgtataaacagagtgggtcacaggaggaactagtattgctgccaggagaaactcgactctttgcctgggcagatcccactggcatcaggaaactcacttggaactatgcagctaactttggggagcatgatctcttaaaggtcaattttgacaaagtgccgatggaaatgcgcctccctatccggtgccctattaaacgggacttcttatcagggattcaggttgagtttaagcagtctcctcaccagagaagcctaagggcccggttgtattggctccaggtcgataatcagttaccaggcacaatgttcccagttgtatttcaccctgtggctcctcctaagtccattgctttggattcagagcccaagcctttcatcgatgtgagtgtaattacgaggttcaatgagtacagtaaagtcttacagttcaagtattttatggttctcatccaggaaatggccttaaaggttgatcagggcttccttggagctgttatttcactgtttactcccacaactgatcctgaggctgaaagaaaacggacaaagttaatccaacaagatattgatgctctcaacacagagttgatggagtcttcaatgactgatatgtcaatcctgagtttctttgaacatttccacatttcccctgttaagttgcatctgagtctgtctttgggatccggaggtgaggaatcagacaaagagaaacaggaaatgattgcaattcattctgtgaacctgctgttgaagagcataggtgccactctgacggacgtggatgacctcatattcaagcttgcttactatgagattcgctatcagttttacaagagagatcagctcatgtggagtgttgtcagacactacagtgaacagttcttgaagcagatgtatgtgcttgtattgggcttagacgtgcttggaaacccatttggactgattaggggcctgtccgaaggagttgaagcactgttctatgagcccttccagggtgctgtccaaggtcctgaagaatttgctgaaggattagtgattggggtgagaagtctcgttggacacacagtaggtggtgcagcgggagtcgtatctcgaatcactgggtcagttgggaaaggcctggccgcaattacaatggacaaagagtatcagcagaagagaagagaggagatggggcgacagcctaaagattttggagacagtcttgccagaggagggaagggcttcctgcgtggagttgttggtggggtgactggaataataacaaagcccgtggaaggtgccaagaaggagggcgctgccggcttctttaaaggaattggaaaagggcttgtgggtgccgtggctcgtccaactggcgggatcatagatatggctagcagcaccttccaaggcattcagagggtagcagaatccactgaggaggtgtccagcctccgtccacctcgtctgatccacgaagacggtatcattcgtccatatgacaggcaggaatcggagggttccgacctattagagaatcacatcaagaagttggagggcgaggcctaccagttccactgtgccgttcccgggaacaagagggctgtccttatgatcacaaacaggcgagcactgtttataaaggaggttgaaatcctaggccatatgtctgtggactggcagtgtctgtttgaagattttgtatgtcctcctgaagtcagtgaaaatctgctgaagatttcagttaaggagcagggtctgttccataaaaaagacagtgccaatataggccatcttcggaaaatttacctgaaggatcccatcacagccaagagggcctttgatgccattgagagcgcccagtcagcaaggcagcagcagaagctcatgaggcagtcgtcagtgaaactcctcaggccccaggggccgtcttgaccatggattctacaaggcttctgagggggaagcggccgctgcagggcctgctcaagagaacatttccagcgattccttggctctgggttttggtgttttgttttgttttttgtttttgactcttaattttgagtcttgggaattctgcatatattaggaatctactgctacacgtttaggtcagacctcaaagaaataccacttcagcttggagagacttattcattaatattaaaattgtgaagcaaagagtggtgggcttgtttttaattaatctttactgaagagaggagattttaaaatgagtagtattctttgaaaggttttattcagacaaatagtggacactgacatttgtttaaaagtaatttgtgcaataattgaactaagagaacacttttggtaagccagtcagttgactgaagaaatgtatctaaaggagaggcagtgcattttctatgttcattttatgaaaatgttatttttcttctaataggatgagttttacacgagtgctttttcttctcctttctatctagtctcagaccatgggcggtctggcagctttggtgggcagccctgcaccgctgtctgtagcgaggcacccaccggctgtcagagcatgagcacaacgacggattcttgagaaatagaaactgagaaattgcactatgagctcctcagcattcaggaatatataaaatacaatatttttttatatttccagagatctatttt

SEQ ID NO: 2304 - protein, 3203 aa, Mus musculus
AREAGQSQRLLERWLLHVLPWIEGAHLVFQPISASAKLYMNPGAESELKTPKLDGNVEVQNIAIELTKPQDLEKSLDVFNIILVRQQAQVEVIHSGQKLRKKSAEAGEKRGWFSGFWGKKESKKRDEESSVPETIDDLMTPEEKDKLFTAIGYSENAYNLALPKQYVAHILTLKLVSTSIIIRENRNVPEILRVQIIGLGTQVSQRPGAQALKIEAKLEHWYVTGLRQQDIVPSLVASIGDTTSSLLKIEFETNPENSPADQTLIVQSQPVEVIYDAKTINAVVEFFQSNKGLDLEQITSATLMKLEEIKERTATGLTHIIETRKVLDLRINLKPSYLIIPQTGFHHEKSNLLILDFGTFQLNSKDQGAQKTANASLEEIIDKAYDKFDVEIRSVQLLFAKAEENWKKCRFQHPSTMHILQPMDIHVELAKAMVEKDVRMAKFKVSGGLPLMHVRISDQKIKDALCLINSIPLPQKSSTPSPERQVASIPVLSGGTKALLGTSLLLDGVESESDEEFFDAEDGDSQAARTVKASELKKAAEVPNEELVSLLLKFEIKEVVLELTKQQKEEETILVFNVTQLGTEATMRTFDLTAVSYLRKISLDYHDIKGSRKKPIHLISSSDRPGLDLLKVEYIKVDRNGPSFQTTFEKTEQTVKVAFSSLNLLLQTQALLSSLNYLTTVIPSDSQNTGVAKEVQAMPEKQKNSPLQKVMVPSRDSDVIGFRLFAKLNAFCVTVCDEKSNIAEIKIQGLDSSLSLQSKKQSLFARLENIIVTDVDPKTIHKKAVSIVGNEVFRFNLDLYPDATEGDSYTDMSTVDGVVHVGCIQIVYLHKFLMSLLSFLNNFQVAKEALSAATAQAAEKAATSVKDLAQRSFRVSVDIDLKAPVIVIPQSSLSTNAVVVDLGLIRVHNRFSLVSGEDTANPPVIDKMEVQLTKLKLSRTAIQPGTSHPDIQLLHPINLEFFVSRNLAANWYHKVPVVEIKGRLDSMNVSLNQEDLNLLFRILAENLGEATEDLDKGKPRIQERGETKACREVSTPQDVHTTQGVPAARVEEWVDIINVLLNFEIKEVVVTLMKKAERKGSPFHELKILHLGMEAKVKAHDMTAAAYLRNISMRCFHFPDSKGEPLRIVNTSDVSDGTLLKLLFIKADSDGPDFKTIHDNTKQKLKVSFSSLDLVLHLEALLSLMDFLSSAIPSSDSSSSEKEPELKPLVGESRSLAIRAVPSSYEGDAFDLKITAELNAFNIFICDQKSNIAEIKIHGMDASISVKPKQTDVFARLKNIIVMNVDSLSIHKKAVSILGDEVFRFQMSLYPDATEGENYGDMSKVDGRLSLKVGCIQIVYVHKFFMSLLSFLNNFQAAKEALSTATVQAAERAASSVKDLAQKSFRLLMDIDLKAPVITIPQSSVSPNVVIADLGLIRVENKFSLVSVEQLALPPVADEMSIQLTQLKLARTVLQADSPQHDVEILKPVNMLLCIQRNLSAAWYTQIPGMEIKGELKPMQVSQDDLTVLMKILLENLGEASSQPSPTQYAQEAARVKRDTRSGPDYLKEQELADPKPPGDQTVTLQFDFHFDSLSIILYNSDSSQMFKDGSMNVSLKLKTCTLDDLREGIERATSRFVSSEFVVQSFRMIDKKNDQDNNSSMIDISYSQDKNGSQVDAVLDKLYVCASVEFLMTVADFFIKAMPQSPENIAKEIQIPSRQTAAGRVKMEKDDSVRPNMTLKAMITDPEVVFVASLTKADAPALTASFQCNLSLSTSKLEQMMEASVRDLKVLACPFLRERRGKSITTISPIILNTVMTIMAAMSPKTKEDEWKDTPKETDNLWAVKSITDYNSWFLGVDMATEVTENFRDSEHPSIEENCVVAVESVQVTLECGLGHRTVPLLLAESKFSGNIKNWTSLMAAAADMTLEVHYYNETHAVWEPLIERVEGNKPWSLKLNVKKNPIQDKSLMPGDDFIPEPQTAVHSGATMNITISKSCLNVFSNLAKGFSEGAASTFDYSLKDRAPFTVKNALGVPMKVQPNRNLKVMGSPEKSDIYDVGAGQHLELDYASLEPSRQGKLSILSRQESSLFTLTFVPYGYTEVASVPVARPGRRLYNVRNPSASHSDSVLVQIDATEGNKVVTLRSPLQIKNHFSIAFIIYKFVKNVKLLERIGIARPEEEFHVPLDSYRCQLYVQPAGGLEQQYTHSSTYISWKEELHRSREVRCMLQCPAVEVSFLPLIVNTVPDELSYIGAHGEDWDPAYVIHLYPPLTLRNLLPYSLRYLLEGTAETHELAEGSSADVLHSRISGEIIELVLVKYLGKNWNGHFRICDTLPEFFLVCFSSDTAEVMTVDLSVHVRRIGCRMELSVFSPYWLINKTSRVLQYRSEEIHVKHPADFRDIILFSFKKKNIFSKNKVQLKISTSAWSNGFSLDTVGSYGCVKCPATNMEYLVGVSIKMSSFNLSRVVTLTPFCTVANKSSLDLEVGEIASDGSIPTNKWHYVASSECIPFWPENLSGKLCVRVVGYEGSSKPFFYNRQDNGTLLSLEDLNGGILVDINTAEHSTVITFSDYHEGSAPALIMNHTQWDVLTYKQSGSQEELVLLPGETRLFAWADPTGIRKLTWNYAANFGEHDLLKVNFDKVPMEMRLPIRCPIKRDFLSGIQVEFKQSPHQRSLRARLYWLQVDNQLPGTMFPVVFHPVAPPKSIALDSEPKPFIDVSVITRFNEYSKVLQFKYFMVLIQEMALKVDQGFLGAVISLFTPTTDPEAERKRTKLIQQDIDALNTELMESSMTDMSILSFFEHFHPVKLHLSLSLGSGGEESDKEKQEMIAIHSVNLLLKSIGATLTDVDDLIFKLAYYEIRYQFYKRDQLMWSVVRHYSEQFLKQMYVLVLGLDVLGNPFGLIRGLSEGVEALFYEPFQGAVQGPEEFAEGLVIGVRSLVGHTVGGAAGVVSRITGSVGKGLAAITMDKEYQQKRREEMGRQPKDFGDSLRGKGFLRGVVGGVTGIITKPVEGAKKEGAAGFFKGIGKGLVGAVARPTGGIIDMASSTFQGIQRVAESTEEVSSLRPPRLIHEDGIIRPYDRQESEGSDLLENHIKKLEGEAYQFHCAVPGNKRAVLMITNRRALFIKEVEILGHMSVDWQCLFEDFVCPPEVSENLLKISVKEQGLFHKKDSANIGHLRKIYLKDPITAKRAFDAIESAQSARQQQKLMRQSSVKLLRPQGPS

SEQ ID NO: 2305 - DNA, 227854 bp, Homo sapiens
  misc_feature (1)...(227854): n = A, C, G or T/U
ataatcctagcactttgagaagccaaagcgggatgacagcttgtgtcaggaggtagaggctgcagtgagctatgatcacaccactgcactccagcctgggtgacagagtgacgccttgtttctaaaagataaaatgaaataaaataaagcagaaaccatttctgaatccagattgataatggagtcatatttaacaccatcctgtatatttaaatattttcaattttttaaaccctcatttaggatgcattttcctatttgcataaaaaaaagaaaaaaatgccctgctggcagtgaattcaagggatgagggaaaatcgtcctctaaaacaggattgttaaatctggaattattatcagaagccagaggtaaaaccatgctatctgtacactctccactgcctgttccagcagataaactcacctggttacaacaaggctggcacccatttctatgattctgaggccggttagcttcctcctcagagctttagacccatcagctcatctcaatgcctgaagttattagcatgagataataaattattcatttcaagcaatttgttttttcaccaaaagcaggatgaggaatgcaagtagacacgaacttcagtgtcaacagtttcagagagaagttgcacaatactcgcaactttaatagcgagccctttagacactgtggtattacctacataagagtaatgagtgaaatgctgattgtctaggttcaaattctggctctgctctttattctgtgcctcaatatcctcatctgtaaaatgggcatagcagtgcctccttttgggggttaaaacataaattaacgcttgtaaaactatttattattattattattattatttgcagacagggtctcactccggttgcccaggttggagtgcagtggcacgatctcggctcactgcagccttgacctcccaggctcaagtgatccttgcgcctcagccccagagtagctggaactacaggtgcgtgccaccacgtccggctaaattttgtattttttatggagacgcggtcttcccatgttgcccagcctggtctcaaattcctgggctcaagccatctgcccgcctcggcctcccaaagtgccaggattacaggcgtgagccgccacacctagcctattataactattatttaagcttagaatattaaaatggtttcattttctccaatgcttttccagtgagatatagctaggagtatcaggctggcgttccaactaataattcactgttgatcttggacaagtcacttcacctcttttgccctcattttcttatccggggtcttaaacaaaatgcttcaaaagtaaatgctccaagatggtctcgatgcatgttgtggaaagcaccaattttaaaatgaggtgattggagcaaacagatcgccaagacactttctagttctaacacttcatgtgattcattatttcctaggcgtgtgtggtacatatggtatgcaaatggctgtctatattgggaaacactgtagaaccattccatttgctgaaaaaaattctggaggtatctatggaaaatatcatatcttttactgggatagttaatctagaatcatctctgccagtgttgtactgaaacgggactgataagaacaacaaatacacgtttattttgtaccacgcggctgtcagtgtccggagtcccccgggcagagcgccccggggagggctgggccctcagagcagcaggagggcgcccagggacagctcaccctggcccagcaggcggccccgctcccggccgcggccctcgtcccgggccttgactcgaacggccaggcggcgcacttcgtcctccgagaggccgtcgaagcagaagtcctggtcaaaggaggccttgcggctgcgccccaccacagtgctgcattgccgaagcgcggtgcccggcggccgcaggacgaggctgaggcgacagctgacggctcggggcccgggggcgcctccggccgggctctcggcgcggagcagccggaggcggagccgcccggttcccggacagtactcggcggccaggcgcagggcgtcgccggcgcggcccagagccacggtgccctcggcctccaggcgctcgggaaacgggacccgggacgacggcgggctcgtggagggggcccgggccggggactgggagcccgcgcggcgctccttgtcctcgttcccgctggagacggagcggacgcgggtcaggcggcgactcctcccagcccgcagcgcgcgactcagcagcccgtcggggacgcgcaggaggcggcagccgcggggccgccgggcgagcgcgtcctggggcgggcggggacagccgggggccgcgggggtcgccgggcccggagctcgcgggacgcgcagggtccccaggagggcgtccgggccgccgccgccgccgtaggtgtgggcccggggccggggcgcgggcgggcccccgagcaggagcgactccttgcggcgcgtgtgcgggctctcgagcagcgcgcagaagccgtaggcggtgcgcacacggggcaggtgcggcagtgacagcgcggcctgcgagcgcgggtcccagtctgtgcggccggcgccctcgtccatccctgcttcttcgacccaagaattccggagcgcagccaaggccaggcggggcatgagccgtggcgggatgcagaactcagggatgcggtccggagtgagcacatttgcgcacgcggcggtggtgcgagacttggctccgcgggcccgacccgggagaagccagtctccgctccgccgaaggcactcaggacccaagcggagtcgctccaggcaccacatctggccactctctgctggagcttgtctacctgcagtgcacaaaggcacaaggatcgtcagagcgagtcccgcaaggtgcagtaaatcctgttccttttctcctattaatactttcggggtgtttcttcctgcctttcccgaaacaaggcaaactgctcttgcttgccgctattgcaaactattttttcagtgagcgaaaaacaactgtttttcttttgtcctatctcaactgtgttgtaatacacacttcggagcttgttttaatccctctccgccctggctggcctaaggcagagattcacaaaatgctggattgtaacttcagtcgctctgttctctgtgccaacgattgccttgcaatcgtttcctgactctttggaccatagcagtctagtcctcagctagaattaaagtaattgttattccttccgggaaactgtggctggttctccccttgcagaggcaaagagcctcagacgaatcccccagggaattaagcaagccgatgggtccctcctaaaatacctggagtcctgcgtcagatgggtctctgcacctttctgcctgggacaccgaccaggagaggcgcttagcggctgggaaattcaaagcgcgcgcggcggggttcagcaccagtgttcaaggactgccagcctgagcttttatacctgccgctgggagcgcttgccagtgggccgagcagaggggcgctgcctggtaacctgacgccaggctcttccctgtccctctgccacgtggctggatttgctgagcaaggtttggagacccagttctttctctctccggcttcaggtggaggtgttttcctcggaaaccccgaacaagtttctgtttcctcacatgcaaaatggtattaagtctctactataccgcagagtcattgtgaggatcgacgggcgtaatgaatgtgagcacgtagaagtactctacattcaccattaaaatgaagacaagtccggtttgtcttattcttgcctaatacccttccccaaatccagcttcccagttgcccagctttcgaagttctttacttgctttccggttttcagttctgattttagatgttcttttctgattataaacccctctgggttagggggaacatttcatgtcttgatcagggtggagttacagaggtgtatccatatgtaaaaacaatcaactagtgtacacttaagattagagtactttattgtatgttatacatcaatttaaaaaatcacaatctacttcttaagccatgtgtgctgattttttatcgggaaaatgtacacttgcatgcatctgggcagttggaatcatcctttggaggcgccctgactacatctggcctttctaggctgtgcccaccagagagacccttttccttccttttgaaaactaacctgtgttcattttgtaagagagttgcttccagttagctcaggctgaaagagatctgaggcattttgttcagcgttcaggcagatatttctgcctaagatactgccttgcaaactattcacttgtctaaataatatttaatgaattaaattgaattcatgcaaaaatgatttcaggatagggcatgtgcattttgtttccaggacacacaggcactgtgctagatgatttacatatagtctgtagaactgtcacagaaaccctgcatattcggatcatccttattttatagatgaaaactcagtttcagaggtcaagtatcttatccaaggtcacataatgatgggaaatggaggaaatcatacctactaatgggtataaatgagctgtttggggaaataataatgtaaaatattttgcaccatgtaacatggtaagtgctaaatacatagaactgattattattaataaagatagaaggaaagttgtaaagtatagtggttaagaaaattgggtctgaaattggatctactgttaatgccagaatggttgctatgtgaccttgagcaagttaactgttctaagccacagtatcaaatttaaaattaataatagtgtcaacctatagggttatcatgagtataaagtaagatggtgaatatgaagagttcagcatagggcatgacatacacaatgtcggatataatattattattacagaagagagcaaatgctcattagttcattcattcaaagtaacatgtactgaatgttttctaggttccagccatcatgttaggcaagtggatacaggttggctgtacaagatcatatcagctatgtaaatccataaatgatggagtaaaatgatgaggataaactatttgaattccatctgggtgaggcaggcgtgagaagagactaccgaacattatttatttagttatttatttttaagacagggtcttactctcttgcccaggctggagtgcagtggtacaatcttggctcactgcaacctctgctttctaggctcaagcaatcctccaacctcagcctcccaagtagctgagactacaggcatgagccaccaggcccgactaacttttttttttttttggagagatggagtttcaacatgttgaccaggctggtcttgaactcctgggctcaaagtgatccgcccacctcagcctcccaaagtgctaggactataggtgtgagccactgtacctggcctgaacattacttatatgtttctagtagggggcaggattggtgggtctctggatttactgtgtccttgaatagctattttttttttttttttttgagacaggggctcactctgatgcccaggctggagtgcagtggtgcaatcaagggcacttcaacctcaacttctcaggctcaggtgattttcccatgtccccctcctgagtagctgggactacaggcatgcaccactacctggctaatttttatattttttatagacatgggattttgccatgttgcccaggctggtctcaaactcctgggctcaagagatcccccagcctcggcttcccaaagtgttgggattacaggtgcgagccactaagcccagcctacttctttgtcttgaaatcacctctactctttgccaaaattcttgggccagggctaaatctatgggaaaagttttatcaaattatatacttgagggccatgtgcatgtgttctgactcagcttttcctgggagacaagaatgttgttagccctgttgagagctcttggttaaagtgattaggagcacagatcagagtttacagtctgagaagttggctgaaaagttgttaagcaagttaatgaacctgtctgagctcaagttataaaatgagggtaataataccgaccacattaagattgttgtgggggttaaaaagatatgcatgaaaatgcttggttggcagttaaacactagctaacagttattattattactatcattttattatgaatgtttgcttgggcagggattagctgattcatacatggattcctttaaaaacatttttctcctcaggcaagcaaagcagatctactttgtttttattaatgattcaccttctttagtaacaccttaatagcatttcctgtacatgattttttgaaaatagcagagatttgccattgcgtggctggtccctgtgaccctgttaagccttatgttttacttaactcggaagcacgaaccaaccacccagtacttgggagaatggtgtaacagggtgcccggaacacacaaatctactcacaggaagacagtggctgttccaagctcccagctgtagctgtgggaacatccagtattggagctggaaaacaattctgtaaagtgagcatgaatagaccacataccatcaagaccagaggtgctctaagagtaaaaggaaattaaacattttaaagcatacttacaaaaatataggaggttgagtgtcaaggaaagcaagaagagagattacaaccaataaaacaccagtgttctgacttatgcatcttgttcaacacaactagagtatggggtactggaaagaatacagagcagggagtcaggacacttgggtttgggtttttgctctgacagtcactaacttgtgggactttgggcaaacccttaattctccctggcactcagtgtctccatctgtcaattgagggggctggattaacaggatgatcctccctctggcactaacattctgaaatccactcccgtgctttctcctagttaacctccctaacttttcctgcagtccatggtgtcatggcttatactccagctttctcctccatttcctttcccccaaattccttctgcttttctccaaaaactctagggttggggaatagggtatgggtggtggttagtgtgaagttttttttttttttttaaacacttttgagttaatttttaagtgtccctaacttatacttttgtttttaacagaaatactttgctcatctgtttttattgtttagtccctcattgaagtttagttttgtaatttcctttgttgtcattctcattgttcttaagccagaatgaaggcaagaactataattaattagaatgctcattttctttaacctctgttatccaaattatttctgatataatgccatacataagggtgctaatggtgtttcttgacattggttatagtttgttttaaattgggactgtatatttctgacttgttaaataatggaagatttggggcattactgaatgcacataatcaatcccttaaaacatgctgaaaatggaaaatagtaaaatttaaagctttttatactacatgataatagcatttttttgtaccaaaaatgtagagccaaattttccactctgagatttattttttctgtcatgaacctttcaaagtaagatctctgaaaatgactaatagcccagtgttgattaaattgtataattaccagaagagaaaagggtggcagtgctcagagaatcaaaggaaattaatatctgctgtgtgactttgggtaagtcacttaacattcccgagcttaatttttctgtaaaatgaggaccatactactacctgcattagctacctcacagctcttttgtgaggagtacacaaaaatgcctaccttcgcataataatgacatgaggccttacaaagtataactgaaacataataaaattgaatgatgcatatgaaagcacatttacacattattctttcaaaattaccaagttataccatagaactgtaaggaattactttattagacaaagcattagtgttactcacttctcccaaaagattgtgcctattgctccacctgcttgaccaagctatgttgcctgtgccatctttcctatcatcttatactgttattcatacatccttggattggcttctttcttaactttttatggtacatgccttatctcaaccagaacatatattgcttctttacattcctcttggagcatagtcagtgtgaatgtaaaaaggaagcgggattgttagagtgtatgactagaaagaacgtggagaaagtttgaagagagtgttctaaacactgggaagttattggatgtttttgagcaggtgactaacctaagctcacctgtgctttgggaaaacacatccggtgttcatgagaatagactggaggaaggaataactggaggctaggaagtgaatttcaaggagatggatggcatggtccagaagaaaaacatggagaatttaggaaagatggcaaaagcaaaatagacaggttaggctgttatttggttgtggatggtgaagaaatccaaagtacttactagtattttgtctttgtgaccagctaggaaaaacagacggttaaggatttatcttcttaaagaggaatggagtgtgcaaaagtgggagaggaatgtgatcttgatagtactagttagtactgactgggtctttctttgtacttttaattttatttaatacacaacaccaattgtagccattttgattttctttcttctccagcggactttgaatttaagatttttctttgtgatcctgtgcaagcctaggttgtttaagaaaaatacacgaatagtttctcagacacttcctcgtagcaaagcacttattaatgcttgtgactacaaataatcagcatttcttaggtttcttcctgtgtactgtatctcaacaactttttgaaatatattttaggaaaaaatttctagttctctaaagaggtgaatctcaatgggtggttaaatttcacaagggttgaaagatcttgtggtataaaagctctgcttttaaggtcgtgctacatcaaagacagttcaacgatagcatggaagaaagtgatatataaataacaagtaactcatacttaaaaaggcactactacgttttgttttttatatttgtaatgagataggtaactggttagtggctagtgaattaaaagcgaatcttagagaaaggggaaaagaacgcgtttcccacaaaacgcgtatattcagttctcattctatgatatctgccatttgatgtggttctgttcccctcctcccactttcaaattatttgtcgcgcgccagtggtcccagctactcgggaggctgacacaggaggatctcttgagtccaggatgtcaagtctgtagtgagctatgatcccgacactgcattctacccttggcaacagagcgagaccctgtctcaaaacaaaacaaaacagaaacaaaataaaaaaacaatgttttcaagaagcagagaccaagccccaggcggagtcgaactctagcaggacaagaacgcggtcggtccctttcccccacctgatccacaggtgcaggggtggttgcctaggtgacgctcagcgcatactccaggccaggcggctccggacaccgcgatgcggccggagttcaacagcaggtgacggcgggaaagcagagcggccacatagatgtccctgtactcggtaactcttgccctcccttgttcttctcgaaggtccttttttttctcgtgcacagctgacgagacaggcgcaagctaacttcccccgcactcctccgtcggcctctagagggccagggctgcggcgcctacaaagcctcgggatcacagctgggcctccttagctaccggccgggcgacagcgcgcctgcgcaccggcggggtcacgcgcgcggcgcgggggtgggcctgcgccggaggggctgtcatttgcagcgctggtcgcagccctcagctgcgccgggcggttccggctcctccctctccttgtgcctcagcgccaccatggtgctggagtcggtggtcgcggacttgctgaaccgcttcctgggggactatgtggagaacctgaacaagtcccagctgaagctgggcatctggggcggtaagcgagagggcgcggccagtgggctgcgggcgctgagggcccagccgagggctgctccgtccgggattctgcccgggccctgctccctgcgccgcctgagactccccatcccggtgcggcaggtgctagatgcgggagcctctgccgcccgcggattctcggggtcccagtcccgactccggctggggagatgcggcgggatcccgcccgcgctgccaaagttcccacctttctcgtcccccgaggccaagccctggccctgctgtccccgccctgcccgtttctgtggtcctctcgctgcactcagggtggcccctttggccctacagcataaaaacagagccctttctgtttcggtatcgcgtggagtgagcatggttgtctggtcatatacgctcgaagtggcactaagaaaaaaggaggaagttgcatctcgcagttatcttcactatcattttacagggagcaagaactgggttccttctctttaggattaccgggtttggagaggaacgggcaggagatctttaagataggcgtgtgcttagggattcttactcttaatgctttcagctcctgtgaaaatgatttcttcctttaatatttacttttccgtcaatacgaagaggattttgaattttgttttggagcaatagagagaaattcaagcctcgaccagcatcgtcattaattaggtgtctgcttggttgcatgctcaggaatttatgccaacgtttttatcctggagattaagtgtataaaagtattcaggaaatagtgtacttaaacatacactcttcaacgagcttaatcgtttgcatgaattacgtgttaagctttgaggactttgggactttctcactccacaaaaggtttgggaactttgtcagctttggaggaaaattcaaaaaacgactcaaatgtatggatctgcttttaattcaagcaacaacaaatagctatagacttcccctgtccactagggtaaccactagccactgtagctgtggagcacttgatatgaggttagtgctaattgagacttgctgtatgaattaaaacatcgttttgaataagcattactcctaatgaagtaggagaaaaaaataatacctcaataatttttatgttgcttatgtgttgaaataatatttgaatatattgggttaaattaaatataatattaaagtgtatttcccgtgttttttagttttactttttttctttttaaacttggcttctaaaatttataattacgtatatggaacatatattgggcaatgctgtttataccctgaattacggaagagcctggttgttgttgttgttgttttttttttggcttgtctttttgagacaaggacttgctctgttgccaaggctggagtgcagtggcaagatcgcagctcattgcagcctccaactcctgggctgaagtgatcctcctgcctcagcctcccaaagtgctaggattacaggtgtgagctatagtgcctggcaagagcctgtttttaataggtggctgatcatttgattggttcactgtggtttgcccaacaatacaatagtcccttggtatctatgggggattggcttcagtacccctgaccataccaaaattggaggttgctcaagtcccttaaataaaatggcctagtatttgtatgtaccctatgcatatccttctgtatacttttggtcatctctggattgcttataatacccaataagtaagtgctatgtaaatagttgttctgttgttttttaatttgcatttttttattgctgaattgatactttttattttttccccccgaaatatttttggtctgcagttagttcagtccgtgaatatggagggcctactgtacattctttgtttacatccccccaccacactcaatacaatgtaaaggaaaggtaagtaaagaaagacacatttaaggaattaaatgaccagcatcttctgcagaaatcaagtatttcttcagaatactggcaatattctttccagtgattccttatagtttgtaaacatttgaaacttgaaaacgcaccggagtagcaaatctgaaatctgaataggcctagtgaatggtgtgctgtgttggacaagccacttaccttattgggccttagtttcttcatcttaatttaaactttatagaaaaaatatttttaaattctgaaaagtttaaatcatactggatgatataatactttcatgtaattactcatatttcaatgttataatattatgccatatttactttagacattttctttttaaaaagataaaacgtatggatatagtcagaggttccattgccatcaaatgttactctcttttatctttaaaattggaggttggactaggtaacatcgaaggtgatgccaatattctgttcttctgataatggttttaccatgacattgaggagtatactgcttgaagattttgaagtttttcacaactgaaattaaaaatgtcgtaattttatgttatttccccttttgtctttttttggtgaaatctagaaaaggagactttctttcatctcatttttaaatttttagaataaggtattctgccagtggccaacattaactttataataggcctgagcaaataaacccatttctttcacatattgtgtctagtgaacatccaatcagggattctcctagctttatcagctcacaactctgcctctgtaaagctttgctgccttttatttttgtggttgctataaagctagaagtcacgagcttttatcattattgcacagtctgttgttgataaccctaatttctcaataaaattggaaggcaagatatctgagttgatttttcctgttctttcaaaatattgctaaagaaatttgtcttaaacttttttgggtaaacaaatgggaatattaatttaataaaataggtgacattttatgatatccatgatgttgacaagttttacaaaaaattgaaaattctatataatcttctttgacaactatttgctttagcagataaggtttacagttcacagagtttttttgttgttgttgttgttgaattttcaagtcttgagaaagggaagaattcatcttgtaaatatttcactgtagggaccagccccacagggtcggtgggtctctccctgtgtgcggtgacgagagagtgtagaaataaagacacaagacaaagagataaaagaaaagacagctgggcccgggggaccgctaccaccaatgcgcggagaccggtagtggccccgaatgtctggctgcgctgttatttattggatacaaagcaaaaggggcagggtaaagagtgtgggtcatctccaatgataggtaaggtcacgtgggtcacgtgtccacaggacagggggcccttccctgcctggcagccgaggcagagagggagaggagacagagagaaagatagcctatgccgttatttctgcatatcagagacttttactactttcactaattgactactgctatctagaaggcagagccaggtgtacaggatggaacatgaaggcggactaggagcgtgaccactgaagcacagcatcacagggagacggttaggcctccggataactgcgggcaagcctgactgatgtcaggccctccacaagaggtggaggagcagagtcttatctaaactcccccggggaaagggagcctcccttccctggtctgctaagtcgcgggtgtttttccttgacacttttcgctaccgctagaccaccttccgctcggcaacgggcgtcttcctagatgctggcgttaccgctagaccaaggagcccttctgctggccctgtccgggcataacagaaggctcgcactcttgtcttctggtcacacctcactatgtcccctcagctcctatctctgtatggcctggtttttcctaggttatgattgtacagcgaggattattataatattgggataaagagtaattactgcaaactaatgattaatgatattcatatatctctaagatctatatggtataactattcttgttttatattttattatactggaacagctcgtgtccttggtctcttgccttggcgcctgggtggcttgccgcccacctcacatacctgatcttactattctttggaatcaattgataaactactttgatacatcttaactggaatgtctaactagcctaaagcagtgattttcagtgggaggtgactttgtacccagggtatatttgacagtgtctgagactttttggttgccacactgagggaagaggtgtgctattggcatgtagcagatagaccctggagtactgctaaacattctacaatgcagaggacaacttcctgcagcgaattgtccagctcaaaatgttagttgagaaaccctagtctaagaagaagactgagattgtcttctgcatttgtaagggacctactgggtgctgaaaaaattgtaaggttttaaaaaggacacggaagaagtagattactcttaacgaaatctgtaattcgagagagaaattgatatcttaagtgactgaaaggtatcatgtcaataaaaatgcgtaatctttgcttggatgatctttggaagtagttttaagatcgaaatattgtgttaacatgatttggaaaacatcatagtgtgcatatattcatatatgtatatataggcgttcataatgaaatttacaattaaaaaaggttgagaggccaggcaccgtggctcacacctgtaatcccagcactttgggaggccgaggcaggcagatcacgaggtcaggagatcgagaccatcctggctaacacagtgaaaccccgtctccactaaaaaaaaaaaaaaaaaaaatacaaaaaattagccgggcatgggggcaggcgcctgtagtcccagttactctggaggctgaggcaggagaatggtgtgaacctgggcggcagaggttgcagtgagcagagattgcaccgctgcactccagcctaggtgacagagcgagactcccgtctcaaaaaaaaaaggttgagaaggttggggaaaattactggaatgtccagaatcaggaagtatactttagatgttgcctttaaatttgagaagcaaagcaaacacagcctaccattgtctttctgtttctgttctttaaagattttatttaatgccaagcaattcttatgtatttttaaaagtagtttaagcagaatttccttttaaaaatccttgccactgtagataattgagaccttggttatttattagctgtgggaccctgggcaaaacatttcagttctcactctcgtaatctgtaaagtggatatacaactttcagtgtattgttgagatagattatgtcaaaaacctttgtcattgttgataatattgataataataatgattaacaaacctggctgggtgatggaaaacagtctttgttttattttcataaggatgtttcttctaacttcagacttttagaggtattaatattcttcttcttcttcctcttcttttttttttttacttctactttaagttctgggatacatgtgcagaatgtgcaggtttgttacataggtatacatgtgccatggtggtttgctgcacctatcaacctgtcatctaggttttaagccctgcattatgtatttgtcctaatactctccctccccttgcctcccacctcctgacaggccctggtgtgtgatgttcccttccctgtgtccatgtgttgtcattgttcaaatcccacttatgaatgagaacatgtgctgtttggttttcttagaggtatcaatcttctattgagtgataattttgtgtagagctatcattacatatctaaacatttcttattttccaaacaaatttcttttaaaaaaaacctctatttgcctttgaatttatgcttatgcttttacagtattacctgccagctagtttgtaagtcaggctttcagaggttcagaaaagtgcctggtgggtacatactgcctacataagtaggaaggtttatctagatttttgttccccacaaactggtaccaatagataaatttcacagcccttagctattgagatgtgtccaggatataattgttttaagagtaacatatatttgaaaaggtatgttgaaatgcctcatcttttgcaatatgatttgagtagtattgttgcaatgtagaacctttgtcaatttgatttttcaaaatgatttactgtggagagtcagcaggaaaatcctccagtactcggaactctgttgttcttaattccactggacaggtggaatcaacataggaactgtgatgtgttagatacaagggtgactctggtgaccaggaatagaagccaagtgcaatgccctcagaatctgtggccctgcaaaccagactgaacccgtgctgtttatcccactcctgacagtttatcccactcttgacacttccccttgagctgccagatattgttggagcagcgcagcataagaaaggagaatgaacactggactgggaatgagcaaacctctttaatcttattccatctctgattctgtctagttgtgtggcttttggcatgtctctgacaagtgaccattggttgcttatctgtaagtggaaaggttagacaaggtcatctcttctgtctttaaacttctgtgatttgagcaaggcaagaacaacgtgagatccttcattggatgagtggtactgccacttcctccgcattcatagagagaaaaggtagttaaataatgtatctttatctttcctttttgctcttcacccgatattggtgagtaaagagccacagtcaatgacagtgacaagataaatgaagttccaggctcatgctgatatttgtgggtccaagtgtaatatactgtaatatattgtcttaacaggtacctgtagggcagcttgagaatgaaagaaaaagcagctctttttgctttttttggctttgacacataaaagatgtcagtatctaggtatttctaaacctgtagagggattttctttagtcttttcctcccagccagcacttggtgtagtggaggccacatttctcattagcttgtcctatggcatataaaagtaaacaataatgaaaaggtcattagtgtaatacatatttaggctcagttactaccagttaaagcggtgcttaaaaatttaaatttaagcacctgttcacatatttaagtagcattactaattaaaaattaactccttttctagaactaaaactgagaattggtattttggtaaccattctgctaggaagctctaccacattactcaatattatgggatccctgaagtgaactgaaagggagaaagttcagtggtgatgttgcagctttctacctttctttgtcaaaacttcctgtttcagtagggaaatgggaagagtgagagagttgtttcctttctctttcctgtcttcctctctgaagacaaagtcactgtgaactcattaaaaggagtctagattggttaatttgggttgactagctagattcatttgaaatgaatagctataatattttctttggtattctttttttttttttttttttttgagacggagtcttgctttgtcgcccaggctggagtgcagtggcacaatctcggctcactgcaagctctgcctcctgggttcacgccattctcctgcctcagcctccacagtagctaggactacaggcacccgccaccacgcctggctaatttttttgtattttttagtagagacggggtttcaccgtatcaggatggtcttgatctcctgaccttgtgatccacctgcctcagccttccaaagtgctgggattacaggcgtgagccaccgcaccaggcctggtattctttactaaaacataaatcattaaaataatttgattcatgctttgctttaaaaaactgttcagtcatctactttagctcacctccctggaaaatgaattgtgtcagaacattcagatatgctttcaactaaataatgtttatgttatagatacataaacaaaatcttaaaaaataaatacaaagcattctttatttcactattctttatatgcaaagctagtttcatggattatggcatggcatttttgtttgttggatggtttttgtgtttaatcacagttttggattaacctctatgttttatattaagaaagttgacctaggagttgggagacatagattctattcttagtactgccacaaaaaaattgtataaccttggataaactaccagatctctttagactttaatttcttcatgtataaagtgagaggggcttagatttgaaaatctttatggtcccaaatagttctaaatcataacttgtgaatttctgtcttttgaggaaaaaaatagatttttaaaaagtactaaaatgaccattttgtaataccatctcctgcatctgttttcccctgtggcactacgttttcttctggttatgctctgaacataacccccttgactctatcctaccgttctgcctgtgcccttgttatactaattttagttatcctttttgttttggatttttttacgtctctttgcaaatacagagaccaaaagtggaaccaacaaccacgctggcctgtgaatgctgagtctgattcttttatggcatttttgttgtccagggaggtcgaattaccttctgaattaaaatcctatacgctttatgctctgctattcgggagaacagtgttattctgaagatagcattgagttttataagatttgagccttgagactgccacttactattaggttgccataggattcttgggctagtcatttaacctctctaagcctcagcttctattgcttaatgtatacaacctgtttcttgcccaggaggctgtgaggattgagtaatgttatatatctgaaagtgttttctaaaatataaagatttatgaccttattgtagttggttccaccccagtacaatatgcattctgaagtcagtatttatcgagtacctactctgaggagaatcagtaagaagtttataatcagactggggatttatataaagttaagtgttacgcaccataagaaagctatagcctaaatttctgcaaaagtttagagagattatttctggttggaggtacttaacaataggactatatttcttacatttattttgtaggccattatgtatttaaaaagccattcttggacttaggcaggcttttccttattgtgctagtaccatttgatttttattcataaatacactagcttggttgttttctataactagcaactatttctacttttttttttttgcgatgactccaactcttcatgtcatttgctaatttacttccattttcatcttctggttcactgttgaagaatactaaattttgatccagttttgatccaggatttacttttttttttttttttttttgagactgggtcttgctctggctgtcactgaggctggagtgcagtggcatgatcctggctcactgcaacctctgcccttctggttcgagtgattcttctgcctcagaatcctgagtatctgagatgacaggcacctgccaccatgcctggctaatttttttgtattttttaggtagagacagggtttcgccatgttggcaaggctggtctccaactgctgggctcaagtgatccaatcgccttggtctcccaaagtgttgggattacaggcatgagccactcactgcacctggcccttttagtatatttcttaaaatatctttcaagattggctttgaaactatggtgactttctagcagtgtatgcacatccaaaatatatgtagtttattaatgagaatcatatggggtctcttctgaagcacagactacttactgtgtatattgtctaccctcctcccatgggcctgtcagtccagcataagggagatcgcttcacagaatttccttatctgtcaccttagtctgtttagacttggtaggattagagccacttgattgtgggattggctttagagctttccttgctggcagagttaagtttattcatctccaattattagttaacatatccctgtttgttttttgttttaaaggattagacacatagagtgttggaagttctggccagggcaattaggcaggagaaggaaataaagggcattcagttaggaaaagaggaagtaaaattgtccctgtttgcagatgacatgattgtatatctagaaaaccccatcgtctcagcccaaaatttccttaagctgataagcaacttcagcaaagtctcaggatacaaaatcaatgtgcaaaaatcacaagcattcttatataccaataacagacaaacagagagccaaatcatgagtgaactcccattcataattgcttcaaagagaataaaatacctaggaatccaacttacaagggatgtgaaggacctcttcaaggagaactacaaaccactgctcaatgaaataaaagaggatacaaacaaatggaagaacattccatgctcatgggtaggaagaatcaatattgtgaaaatggccatactgcccaaggtaatttatagtttcaatgccatccccatcaagctaccaatgactttcttcacagaattggaaaaactactttaaagttcatatggaaccaaaaaagagcccatgttgccaagtcaatcctaagccaaaagaacaaagccggagacatcaagctacctgacttcaaactatattgcaaggctacagtaaccaaaacagcatggtactggtaccaaaacagagatatagataatggaacagaacagagccctcagaaataatgccgcatatctacaaccatctgatatttgacaaacctgagaaaaacaagcaatggggaaaggattccctatgtaataaatggtgctgggaaaactggctagccatatgtagaaagctgaaactggatcccttccttacaccttatacaaaaattaattcaagatggactaaagacttacatgttagacctaaaaccataaaaaccctagaagaaaacctaggcaataccattcaggacataggcatgggcaaggacttcatgtctaaaacaccaaaagcaatggcaacaaaagccaaaatagacaaatgggatctaattaaactaaagagcttctgcacagcaaaagaaactaccatcagagtgaacaggcaacctacaaaatgggagaaaattttcgcaacctactcatctgacaaagggctaatatccagaatctacaatgaactcaaacaaatttacaagaaaaaaacaaacaaccccatcaaaaagtgggcaaaggatatgaacagacacttctcaaaagaagacatttatgcagccaaagacacatgaaaaaatgctcatcatcactggccatcagagaaatgcaaatcaaaaccacaacgagataccatctcacaccagttagaatggcgatcattaaaaagtcaggaaacaacaggtgctggagaggatgtggagaaataggaacacttttacactgttggtgggactgtaaactagttcaaccattgtggaagacagtgtggcgattcctcagggatctagaactagaaataccatttgacccagccatcccattactgggtatatacccaaaggattataaatcatgctgctataaagacacatgctcacatatgtttattgcggcactattcacaatagcaaagacttggaaccaacccaagtgtccaacaacgatagactggattaagaaaatgtggcacatatacaccatggaatactatgcagccgtaaaaaaggatgagttcatgtcctttgtagggacatggatgaaactggaaaccatcattctcagtaaactatcgcaaggacaaaaaaccaaacaccacatgttctcactcataggtgggaactgaacaatgagaacacatggacacaggaaggggaacatcatcacacacaggggcctgttggggggggtggggggagggatagcattaggagatatatctaatgctaaatgacgagttaatgggtgcagcacaccaacatggcacatgtatacatatgtaacaaacctgcacattgtgcacatgtaccctaaaacttaaagtataataataataaaataaaaaaagaaaatgagaacaaatgaaaaaaaaaaaaaccaaaaaaccaaaaacaaatatttacccttccttcagtttttttgagaactttctatgacttctatgtgttcttagccctggtgatctggctatagcactaaagttatttacattgtatagaattattatgttgttttaaggtagaaaaggaaaatgaaatcttttttatcggtattcagttaaatataaaatggttgatttttaggggagatctggtttaatcttggtcttataaattctttttctttaaacaggatttctggaattcataggatatgtaatgacactgctgcatatttatcagtcagaatagcatgcagtttagtggagagtacttgttagtccagtgccttaccaagataagtactcagctactgcttgaatgaatgaatgcacttttacctctttacactggtgccagtgttaatctgaattatactgcttattcctcccctattctttgtattagaactagagctcctccttcagtgcaaataacttggagaatgtattattcttatttcactgttacagttactgtttgttagataacattcacattttcaaagaggaagtatgcatttgtcagactgggtggcagaaatagatactgctttttttgtttttttttttgagatggagtcttgctgtcacccaggctggagtgcagtggcacaatctcagctcaccgcaacctctgcctcccaggttcaagcagttctcctgcctcactcagcctcctgagtagttgggattacaggctcatgccaccatgcccatgcccggctaatttttgattttttttttagtagagatggggtttcaccatgttggccaggctggttgcaaactcctgaacttgtgatccacctgccttggcctctcaaagtgctgggattacaggtgtgagccactgcacaccggccaatatttctttgttattcttacgtgtctgggggtaaagtaatactagatatagaaaaaatttatataaaaaatatttaaatcgtattgacatgtgaatttacttttgttttatttccccattttccttcttataatttccgtaataatttcacataaaaaaatctaattattataaaaactagaaaatactgaaaaacatcaataaaaaagctatctttaattctaccacccagcaataataagtacaatctctttttgtctgacagtctgtctaaatatacttgtctaactctattagccatattggtagttttcaacatttcacatcttaactaccacctgctatcctactacttgatcaaacaagtaaagtgtcactgcaggagaaacagcccactttttataagtatatttatatttttacaaacattatggtagtgccttaacaattgttataaagacttcatctctaacgcagatgatttctgatcactcctggtaactcttggcccaccaattgagaatgactaggtagaacagtcaaaatttatgagcagggttgaaagtctgcatgtgggccttagatcttattaaactagtttggatggcttcagataggcactagcatctgtgcagattaccctgtaggctagaatagacttcccaattgtaattttgtgtaattcatcatgtgacagatttgaatctaggaatatttgtctttatgtaattttagtgcatatataatacgtaaggacttttttccccctgttgctgaacacgctagtcttccatgactactttattactcctgcatctggacagtgatgatatcctgtcaattctgcctccaaaataactctttactatgactctacctctttcaccctgaagttactgccttattttcggttttacttttcagtgtgttgtagaagtttcctgactgcctgtattctttcatttccctcctactatatactatagtatttccttaccatttgtgaagtttctttcctccttttcttcctttattatagttttcgacaatttattttagaaaatttgagaactgtatgtacacagaaaatgaactttattacatagaaataaccactgtgagcattatggcatcttacagttttttatttttttctatgtatgtgtggaatgcacacacacttgtgcatatatagatacttttaaatttaggtcaatctgggcattcttttactttttaaaaaactcaatattctgtgaacattttcccatgtctttctacttttttttgtttataatacagatgtattgtgagttatgccttcttcctggacatttagatctttaggtcctcctttccttcctttcctcccctcttctgtccttccttctttccctcccaatactgcaatatccttgtagctaaattgtttggacagatcaatagttattccttaggacagttgagtaatgattctaaaataacataatctctgttatatatattttatctctttgttttggtgggtctggaattttttatcctgaaagctcttcattagtctggcccttgcctacctttctgaccttattttgtttccttttcttataccctccagttacaccaaaccatatgtgctttctaaaatgtgccttactcacacttatctatttgccctcttttcttatccacccagtaaatactacttaaaccttccagcctaaacctatgtgtgttcttgatttccctaggcaattaggtgactcctccttttcatcttgtgtacgcttctattggaatatttctaaaattttagaaaattattaggttggtgcaaaagtagttgcatttttgccattaaaaaaagtaatggcaaaaactgcagttacttttgcacagtcccctctgctaagccgtgagtgccttaatgaatattgttctagtaatctttctctttccagcacctaacatataatgggtgcttaataaatgtttaataattttgagatctgggaaaagcagatctctaaaatgatgtaaacaaattaaatatacttttaaattcactccaaaatacctggaagaaaaagttacttgattgaaaaatattaatgggaagtatagctactatagtttttaaaaaatatatgtgtcataaatgattaagaaaatatattacagtaatttacgcctgcatttaatgttgaaactatagttttattagccttaacataatttaagtgaaatgaaaactttttccttacatttttatgtcagcatgaatatttgactattgtgtatcaacaaatacagggatagtgtttaagatttgagtcatgtaatagtatttttataacttagcatatgaatataataaaagttggactgattaaagaatattagaagcacatacagtaatcattgggaaggtagaatgtttggagacatgaaagactaacaccatgtttctgaagaaaatgttaattgataacgtaattaaagaacccaggatgattgatctgaccttgtaatcatctctttatatcttgagattttggcttaatcattcaaaatgatggctactttctttggtcttaaagttcttctgtccaaaaagctccaacttctttcccattgtttgtttaaatgttagctagtttaatgtgttataacttcttttacactggattaacctatagtatgctacaattaataactcttgagcatatgtagcaactattttgtgccgggtagcctcttaagtcacctttgtttatcattgtattcttagcacttagcccagtttcttagtgcttggtactacattgtgataggtttaaaaattggtatgttatagtaatatttttctttgttttctttttttaaaggaaatgtggctttagataatctacagataaaagaaaatgccctggtaagttttttttaaactatgctaataactcacttaatttggtaagttcttagaaacctttgcctactaggcatctgataccatgtactagataaagtgatggaatcactcaagggattacttgttcaactatttgctgttggaaaatctgagattaaagatttagaaattttttcccctaataatcaaaatagtatctcttggaaacggagtgtttttcgttgatctaatttgactgtatagttttgtagttgactttttccttatagcaatattttccttcactagtgtctttacgtatttttgagataaatgagggcttgattttaaataacatatctaattttggaaatagattgatggtctagccttattatagtaatattaagaggtaaaataggattttctggactttagctccagaaagtaatttgtgtcatttattgttgagttgaaaacaaacaaaacaatgccctccatcccccaattaggtttctgtttagcttgttgggctaaatgtgagtttatgaagtcacttaatgagtttattgtttaattaatttttttccggtttccaaccttttatttttatttttatttctttttgagatacagtctcactctgttgcctaggctggagtgcagtggcatgatcttggctcactgcaacttccgcctcccaggttcaagcaattcttctgcctcagcctccctagtagctgggattacaggtgtgtgccaccacgcctgggtaatttttgtatttttagtagaggttgggttttgccatgttggccaggctggtctgcaactcctgacctcaggtggtctgcctgccttggcctcccaaagtgttgggattacaggcatggagccactgcgcccagcctaacttcttaatttctttgatcttttagcatgagtttaatcatctataaagtgaagttaattataaaacaatataatatctctgtgtctttgtggcttgaataagatgagaagtagagcctggcacttagtaggtgctcaaaaatttaaatatttttctcttttttatataggatgctacaactttttaaattttaaacaaaaatgtagacctgattctgttgttatagattggaaaagaggtttttttctctatttatgacaatataaatagaattgtagtgacaggatatatatctaacatactaaggagacaaattatttgaactctgtttcagcctaattcaagttttggttataattaaatataataaactattttgtaatttttatatatatatattttttattatactttaagttctagggtacatgtgcccaatgtgcaggtttgttacctatgtatacatgtgccatgttggtgtgctgcaccctttgacttgtcatttacattaggtatatctcctaatgctatcccttccccctgtaatttatattttttattcaaagtagctcctttccccagttaaaccaaattgatgaatttttacttttatatgggttatttacatttattttgtgtgaaaattatttcaggaggattaaaatgagcatgagaccacctttttgtagtttgcagtttgtatactgtataatgcgaattcccttgaatttatctttcctgtcctccaggaggacagagctgctcttattggcagcaaagactttttttttttggtctaaaaaagactttttaactaaagctattataatagcattctgttcaattcctgtttacgtagcattcagacgtaatcagatgattaggtaaattgattattttagttaattattacctacattttggtggtcagatttttatagtgttattatatagtaagtcaaacctaacggaaaggctgtactgactggtttaatttttaataattctaaaactcaggttatcattatggatatcagttgtttagtattctgtgaataaaaaaagttatttgaactttctagttgtttggaatataggtaagtgaaagtttattattatttgttggcacctctctgtaacttatctaaacgaaatactaatttggtaaataatatattgggaatctagcttttcttttaaagatttttaagtttattcatttactaaatatttgagagagaactgttgttcagtaatgttttcaactaatttatgcaaaaagactcttcttttttctgttctagtatttcagataaacattgtctatgtgtttaaattgatttggtttgattttaatttccatttgatttggtttacttaaaacaagtaaccagtttacctggctatttacaaactttttctatttttactatttatcattttgtttctcttgtgaattctttctttaaagtcaaagtttaagttataatttttttttttgagacagagttttgtcttgtcacccaggctggagtgcagtggcgcgatcccgactcactgcaacctctgcctcctgggttcaggcgattctcctgcctcagcctcctgattagctaggattacaggcacctgccaccacaccaggctaatttttttgtatttttagtagagactggatttcaccatgttgaccaggctggtctcgaactcctgaactcaggcgatccacccgcctcggcttcccaaagtgctgggattacaggtgtgagccactgcaccaggcctatgaaacgttttttggctataaaacatgtcctttatgagttattcaaatatagaaaatttggtttttgtttttctttggacatgtgtatttaaatgatcacacaaaagtgatttttgggttggcttcataatttaagatgtcctttacattttctctttcttctgaagagtgaattggatgttccttttaaagtcaaggctggccaaattggtaagtactttagtcttcatttgaattattcttggtcctattgttttctattttgcttgtgttatttaacctaaaaaaatctttgattaaaagtgtgagagatttttttttgcctcattaattagagctcgtagagttctgaacctaatgtatattatatataaaacgtacatacttcttttttttatgacaaaaggtagaaaatggaaggctatttgaactgcaattgcattcttcaggctttggttccaccacacaaaatataccttcattttcagattagatttccaagttttatgtgctttttctttaaatgtgaaagtagtataatttgcaaactccagtaggtaaactgtaaatgtagcttatttccttcatgttttgttcaaccattttcacttgatatattatgcagcaatgtggtatggaggatatgttttggtaagtacaaagtctctctgcagttaaactcctacactaagaccatctataagtaaatatatatctttgttgaataaattttttcaataggaaatttaatctacaaagtcttcccatctagtccatgctatctggtttttatttttatttatttatttaatttatacatttttaaattttgggtttaggtggtccatgtgtatgcttgttacatggatatattgagtaatggtggggattgcgtttccagtgtatctgtcactcagatattgaactttgtatccaataggtaatctttgaacctccacccccctccttcaatccctacccctttttggagtccccagtgtctgttatttccattaaatttttttatttttaatttttgtggatacatagtaggtatatatatttatggggtacatgagatattttgatacaggcatgcagtgtgtaataatcacatcggggtaaatgaggtttctatcacctcaaagtatttatcctttctttgtgttacaaataatgtaattaatactcttagttatatgtaaatgtgcaatcaattattattgaatgtagtcaccctgttgtgccatcaaatactgggtcttattcattttatctaactttgtttttgtattcattaaccattctcccctgttacccttcctagcttctggtaaccattgttctactctctgtctccatgagttcagttgttttaattttagttcccacaagtaagtgagaacatgtgaagcttgtctatttgtgcctggcttatttcacttaacataatgacccccagttccatccatgttgttgcaaatggcaggatctcattcttttttatggctgaatagtactccattgtgtatatttaccacattttctttaaccattcacctgttgatggacacttaggttgcttccaaatcttggctattgtgaatagtgctgcattaaacatgagagtataggtatctcttcaatatactgatttcctttcttttgggtatatacctagcagtgggattgggggatcatatggtagttctatttttagttttttgaggaacccccaaattgttctccatagtggccataataatttacattcccaccaatagtgtacaaggtcttccttttctccacattcttgctaacatttgttattgcctatcttttggataaaagccatttttactgaggtgagatggtatatcattgtagttttgatttgcatttctgtgatgatgtgatgttgagcaccttttcatatacctgtttgccatttgtatgtcttcttttgagaaatgtctattcagatcttttgctcatttttaaatcagattattagattttttcctatagagttgtttgagttccttatatattctggttgttaattccttatctcttacttgtcctggcaatgtctctgtggagctgtgtactgtaaaggctattatgcatatttatgtctatttgtacccattgtttagctcctacttgtaagtgagaacatacaatattagattttccacctttgagttgatttacttaagataatggcctctagcttcatccatcttgctgtaggggacatgatttcattcttttttatggctgcatactattgcatggtatatatgtatcacattttctttatccagtcaactgttgatggacacttagtttggttgtgtgactttgctattgtggttagtgctgtgataaacatatgagtgcaggtgtctttttatataatgacttattttcttttaggtactcagtagtgggattgctgtttttatttttagttctttgagatatctccgtactgttttccatagaggttaaaccagtctacattttcaccaacagtactcaagtagtccctctcctctgtatccatgccaatatctgttattttttgactttttaataatagccattctagctggtgtaagatggtatctcagtgtggtttaaatttgtatttctctgataattagttatgttgaacattttttcatgtgtttgttggcttcttgtatttcttattctgagaaatgtttgtttatgtactttgctgttttgaatggggttgtttttttcttgttcagttgtttgagttccttgtagattctggatatttgtcctttgctggaggcataatttgcaaatattttctacctttctgtaggttgtctgtttactgtgttgattatttcttttgctgtgcagaagatttttatttttactttttaaaaattaattaattaatttagagacaaagtcttgctctgttgcccagcctggaatgcagtggcacagtcatggcttactgcagcctcaacttcctgggctcaagggatcctcccacctttgcctcccaagttgctgaaacgacgggtgtgtcaccatgattggctcatatttatattttttgtagagatacagtttcatcatgttgcccatgctgttcttgaactcctgggctcaagtgatctatccgcctcggcctcccaaaatgctgggattacaggtgtgagtcaccacgcttggcctagaagcttcttagttaagtcctatttgtttaatttgtttttcttgcatttgcttttagggtctttgtcataaattctttgcctaggctgatgtccagatgagtttttcctcagttttcatctaggaattttatagtttcaggttttatgtttaggatttactttaaaaaataagtaaattacaagccaagatggcttactcctataattttacttatgctacatcctttctcccaactttatcaccctgctattacgctatatcacttttttctttattcaatattctgtattataggaaggctttgtctttcactactctagcatctcttagcaattatttggatacttccgtttgggtcattttatatgacatatatgtttccttttaacatacaagaatatttttatgtttttgtctcgaaacaggataaattttcttagattgaaagcatctttaggcatgtgtcatcttttttgttttttagatagggctgaatgtggtggttatgtgtagcagtgctctagaagtattgtggccctatatgcttcactgaaatcctagaatatagaagttgtagccattcatttattcttttacttttgaaatatttatgcacatgttacgtacaagactacgcaagtgctatgggagatgcaaggatgaaggtgatatctttgtcttcaaggaagttatagacatctaaaattggaacatagattgaaattgtatttccagtgtcttagatcaattatagctgactaaagaaattttgcattatttattatattcttacaatataataaatttattatattcttacaatataataaatttattatattatatttatatatttatttaatatatattatatttatatataacatattatatatatttatatataatatattatatacatttatatataatatattatatacatttatatataatatattatatataaatgtatataatatataatatatttatatatatattatataatataatatatataatatattatataatataatatatataaatatattatatatatttatatataatatattatataatatatttatatattatatttattatatttatatttatattatgcaatataatagatttacattatggaggagattttctaatggttcagaatttgttctttttgcttttaaagtacacaaagatttaatggcttccttcactgttacccattgagttatgagagaccctttacaaataagtatgcaaagtatattgtctttataactatcttttttttttggtttacagagcatttatattagttgttaaatttctccttaggttaaaatattatacctaacctgtagggtcagtgtggctaattaagctcaagtgtgatttggttttctaagagctagacatatttgtgggtgcccttgagttacccgttttcttaaaaatttaaaaaatttcctgatctataaaaggagggagtaatatataaaaaactcaattctaggacctttctgagagattgggggataattagtataaatgtagagaagaaaaggtttagggaacagacagtccctttctgtatgctagttaaagggacgtttcccactttttctgtcttatgctcaccaagaaggcaatcaaataaattttgttaggagattttgagataattacaaatgtaacagtacctattgtaaatataaaatcactggacttagaaatgacccagagcgttgtagacttcccgtgacatgcaagccatttaagaaattcagcaggtttacaagctgaagagaagtgaaaatctaaatggagaaataatttgatattttaaccttgggaatagataccaggtaaaactggctttcctacatatccatctaggtgaccccaaatattctgtcttacattgcattattttattttctctttagtttgttatactgtttttcagttctttgaactttgagcattttcatttaaaaatgattttaaatgaaaaaccaccagtgattctggtggtgtaagtgacttaattattcacatacaagcatgacttagttgaatcaaattcttttctcctgaaaatcttgattagtagctctgagagacctatagattttaaatataagtttaaaaattatagatgaaggaaggtattttattttggaacatgtaaaactttatgtgtaggaaaggtttggatagaattgctgtagtaaggcagattggggacattttgctgcctggagacctggaacgaggggatactagagattagggaaagaaacatggaaagattttgacagattttgcctatttcaaaatttagctgagagcatgcccttttggtcttctcttgtcttccctgaacaggcttttcccccataaaaccccaaaattgggacagtaatattagggccatagttcatctgtgtcatgagtgaaagttttttgtgggctcacctcaggaggacttgacattaataccattgtttccaagagagaacatgtgttctgtcttctaagtgatttataagtagatatttggaatataactggtctgagttgcctgtgactcataatactattcataataccgtatgccttgcttttagagctagcctcttcctgttgtgacaatttggtatgctgtcaaaattccatttgcacaaagttcctttgcatctcttctctgtgttgctgcttcaattcctggtagcttgtgcagatattattttactgttgatctataaggatttatttgttgatgtggatagaagagcatgtgcaatattaagactatcaactgttgttgtgcaccgaatctggtccagcatccttactaataatctggtcactgcttaactcactagatagacttaagcaattaatttaacttcactagggctgagtttcctttttttcaggattgaaataatagctgacttattcattttacagtttttgaatattaaatggataatgattatcaaaatattttatattgaaaaataaaaattacaatgtgactattcacttaatagtaattttatgtggaaaagacctttgtaaactttagtgttggatttttttcattttttctgagtgatgtacataccatgaagagttttttatgctttttcgcttaatggaaagtgagaaatttttgtgttcttgagcagtcaaataataatttaaggttgaaattatgtttccttagataaattaactttgaagattccttggaagaacctttatggagaagcagttgttgcgaccctggaaggattatacctgcttgttgtccctggagcaagtatgttattttaggttataaccattcaataacatcacattgaaattaaattgttatctgagttaagtattttaatacatttatttattaagatagaaggtaatttaaataaatgaatcatacatagatgcacttatatgcatacttttatatatgtatgcacatatatcttaccgcatttgtgtataaagtattgttgttgttgaaaatttaattcattttttcaatttattctgttttctaagagtacttgttttgcaactaaggcttcctgttgagctgcattaggcagatttactgataataaatgaagtgaaataaatctttaaaaatatcctgatgtgttaatctccagatttcaagattgaaaaatttattttttttcctattttgttgcttctgattttgagtgaatgttctttcaaaaatgtgtataattggtaattttttccttcgaaatgatagtattttaatttttaatgttttaaagtagtgatgtttaagtaatatctttattattattttttcacttataagaacaatataatgttaagaaaagtttggatgttttagggaaaaattacttacaatttcttaaccattgtacaaataaaatttttatttttacattttgctcttcagtctttagtttatgcatacctgattttcagtagctgttaccacattatatatacaacattgacttggccttttattatatacatttttgataggtttcacagttttcacagtgacagtgacagttttgaaaggctgtatggtattctattgtgggctacctactgtttttagctttatagtcaatactataaatactagtcaatactatagtcagtactataaatacatcattgtaatcaatactataaatatgtcattatagatcttttttattcttttgtgttatttccttagattgcatgatcagaaatgacattactagataaaaagggcttatatattttatgattgttgatatgtattccgaattactctctgaaagtttaaaaaatcagtgtatattgatcccaggtagtattggatattaaattattccagatttaccactgatagagcagtattctggtgtacttgctgtcttccttctgtttctacttcttatctttgttctcaccctcctcctgtctccctttttcctacctgcctttctacctgtaatttcttttcttccctccttctttttgtatttcagttttttgtaagtgaataggaataatttatgtttaaatgtttcgtaaaactaaaaatgtgaaagtatttttgtattgcagaaggattatacacttacacaatcctaatgaggctgaactttttccgtttgtttatttattaattccatttatttttgtgtgaattgactgtatatttttaggtattaagtatgatgctgtaaaagaagaaaaatccttgcaggatgttaaacagaaagagctatcccgaattgaagaagcccttcaaaaagcagcagaaaaaggtaaaaagtttttttgagataaacttagacatacctatattttagatataattaatatcctttaaagaggatgcttttgtaagccttcataagttgaagttctaaagacataattttttttaaatctcaaaatattgcttatattttcatgactcacttttaggaaaaagtaattgccttttttctgtgagtgttttatcatgttgccaatttgatttttccacttttcttaattagtcatttttattgtgctagtttggaagactttccaaattttcagtatttgcaggcctgtttattttgggcaaatggtaagtttctttgtgtgcatgtttacccgtgttcttgctggataatgaggttaagcataatgctatagtgaaatgatgtttagaggaaatgctgctttaattctagtcctagctatctcccttcgtgttgtacaggatattaaaaaaaaacccaaaaacttgattcttcaggttttaacattttaacatcctgccttacgtttacatttttgtttttatctaaaaataaatctgatgactttgtttggtttatagagcaagaacaaggatatgatgaaaaagagtagtctatagagtgatgaattgaaggacttttccagacatctattgtttatctcaatcaacaattgctgattagggtatatgagttattagcattttatataatttttgtgtcatttggtggcatgtgtatatatttttatgatgaagatagtctctctcaaaagataaagcaaatattgagttagaaatgatgttaattatatttagatataagatttcttttcctagcttaagatgttgtcatttaattgaatcaattagaaatcttttttaaataggttgttcctttaaatttttaatcaaagttttaaattcttgctccaagtattttttcttatgcagaaatattgattcttttattaaaagttactaaactatttaaaaatacagaggttaccatagtggaagaaattttctagaagcttcaacattttttctcttattttcacacttgagcatattttgtcttcctgctgaagcttaagtatctgtatttctagggaaacagttttctttatttgtatgactttaccatggcaaaaaagcaagccaagaatggttttgtttcatgacaattgtgatttttttctttatattcaattttggctaattaatatatgtaaaagtagtaccataaaaatgaaggctaagaattggagagcactagaatttcactttttcttgaaactattcagattaggatattaacatatgtatattcatcattaggtatattgatgtatacttagatatattgatatagcataattacacatttatcatttacaattacataataagttacatatattatttagaaacaaatcttaagctcctcctttttaaaaaatggagcataattatatttgcctaaaaatatgttagtgttttcagtcacctgtaagaaaagtcgtggtatatagtctcatttgttttcgtgattgacagtttaattggtaatatgattattacacatttcgtactcagacttaggaaattttgactcctgagtcttcagtgctgagaaaacagacatttgggtctgacaaagaggctattatgaatggtttgatataaaggatgtacatctgtagtattaattttgtgtaaatagaactgttaggcctatgctgtatatggtaatgacattgtagcttcttgaatgataaaatttaagtttttttcatatagaattaaaattcaaaaagtgaaactcttttaacactcagttttaacatgttatatttgtcaaaaaagttttgagactaaaagatgaattcaggaattgggaagtatatttagattatttttttcttaactgttaagaaacacatttaagaatattgcagtattcttttctcatttctgtggatatgagtcacatcttcaaataatattattcatgtgaatgatagaggacaaccctgacctttatatatttcacattttaccattattaatagttattgattatactttatttttctacttgtttattgatattaaaagcacaaaagcaccattgcacatgtatagggactcagagagggaaggagaggagatgattcaactctaagtagcagatgataaaaatgaaaacaaaattatcatgctggtctgctcataaaaaggattttgacttagcttgttttatgtggtaaaattatattgtttcccactatcgtataggaataaaataaaattgaaataaaactatgagttcatttttagaaagtttgcttaactgtaaaaataaactctttgatatttttctccttctatttcattggagtgagtttatttttctggaaggctatcataaagagaaagattaaattcctagtaaggccaaaagattcgcaaatgctagattctgtacttaagatgttggattttatcaaagtaatatgtacacacacttgaaaatcaatagttttgccaaaatgacatgataaaaaacggcagtcccttgtttcatcctttgctaccctccagaccaactcctttgagttagtaatattttttagcgatgttaacattctgtcattaatctagttcattaacataaggcattatctaggacttcctgttatggtagtcacggagtttacttctcttactatctccttgcaccctgaattctccttcccattttctcataatatgaatatatcataatttttggccaattactagtcactacttagattactatgacaatgtgattattgttcactgcgcaggtcacatgatgtgtgtgttatgcagtttttgcattgctataaaggaatacctgagactgggtaatttatgaagaaaagagttttaattggctcacagttctgtaggctgtataggaagcatgatgccggcacttgctcctggtgagggcctcaggaagctttcagtcacggcagaagatgaattggaagcaggcctgtcatcatttatgagggacccaccccaatgatccagtcacttcacatcaggccccacctccaacactgggaatcacatttgaacatgagatttggaggggaccaatatccaaatcatatcaatgtactatgactatatttcctttcttatacaaccttttgttttccttgaatttgtaaatgctgctttcttatttgcttagtcttctatgtaaatttatctttaattctttttcacatgctacatgaaatttgtctgctatatgagaaatgatagtattttccaatcgtgtaaacccatctgttggtactctctaccaccctgttgtctcttggagatccccctctgaactgattgttttttggaccagctgcacaggtgtcatcttaggactggtctgaattgctcgtctatgtttaattccctgtttcctgggtcctttgccttttttgcttccttagtttactcatttgttttcctagaacacatctagaagcttttaagaatggatgcaccggatataatttcgaaaattcttttaaggctgaatgtctttgtgttttacttctacactcgtttgatttgtctggggatagaatgctaggttaaaaattagaattttgtaggcagcaatgttttctagcttccaggctcctttaaaaaaaagtctgatgccagtctacacattgttgaaagcagaaaaattagagagtccttggaccctcctgtcaaagaccttatattttaattggacaaataagaaatttgcataataataagcaagagaaagtgttgagtcccatcaaagaggtacagacagttttatgggagttcagaatgaacatgttatagtcggccaaagagatcagggtagacactatgaaggtgtatatttcaactggatttaaaggatggatctgcagaaaggagagaaggcataggtagaggagacagtgaaggtgggaaagtatagagcatctgtgggatcagctaacagtttgggagtctgatagagagtagttggatgtagggttggaaagctaagtttaggtcaattttaagagatttgcatgctctgatgatgttaatggtaatgacagtgaaagtagttgacatttattgaggattaactattcagcagtcactcttcaaaatactttatatgaattaacccattaatagtcacatttgatataggtgctatttttgttgccatcttacagctgaggaaagtgaaagttaaataatttgttctaggtcacacagttagaaaatagtagagctagaatttgaatccggtctggctctagatcttgtaatcttaaccctgtacaatgtgaactttcatccatagccagcgggggtgtaagttttcctttttctttctttaagagtccaaagaatgacatgatcagagttatgatttaaggaaaaacttgcagtgttgtctaggatagactggatttggagagcgaagtagaagatgctatgtagccatcattaatgagaatggctataaaggattcagatagtgtatgtaaagggaccagatcacactaaagtaagatgaggtcatttcagcccactctaaaattagcgtcaaatatcacagtaatattatattctgaaaatggacaaaatggcatgcaaaaagagaaccaaaatagtggatttttgcactgtttgaaaacttgtcaaaaattttagtgagccgttagccgaaattgatatttacctgcctcacatattttgaaatgattattataattttaattgttaagaagtttgtgtgttgaaagaacgaaaatggtgtcactgtgaatatttcctcagaaataaaatagttttggtgtcaccaaattttaattaccctgttacatgatttctaattatatgaaattaaatttaggtatattttacatgtgaaattaaaggtgtctttaaattgctttgcattttggttattgctgccatgtgggatgcaggcacacattcaggggagttcatatatggcttggagaactttgtttacaaggacatcaagcctggtgggtatgcatggttaattatattcaactatataaacatattcttgtgtatgcttgtgcttttggtggagtccatttgatggcatgccatccttttagaaaatatggaaatgcaatttttgttttccccctctaccatcatttccttttccttacctgtagtcgtttattcatttactaaatatttgagtgtcttgtggcaatcactgtgctggatgatgctggatgtttgtggggtaaacaaacatgattcactgttcttacgaagcttagaatatgaactacagataactttcagatttgggctactcttttgagtttagttctagagttcagtagtttctgaattaagcagttcctctctgatagcggtggttttggaacgtaaaaagcaataaagtggaatttttctttgaattcagaaccgtgacaggaggtgttcctctgagctttgatttgtttcacctctgttgtagctctggaggtgcctctagactactgtcctgtacagcatattgaaatttcaagcttcgcaaaaggcaaattaaagtcttactgtttatattaggatttatgatatgattcttttatatactaggaaatctaccaaatatattaaaataatactttttagtattttacataatcttatttgttaaactttatgttttatatcatacttcaagagcttgttagatgaactcagtcacatttaaatttgttttgattaaatggcaagtgggtctgtatcttgaaatttgtaaacaataagcatcatgttagaattatttctgtagctaggaactttaataggttgattcatgtgacagatggaagtggaattttcatgacaggctttacagcattaggtgaaattaccctgaaagcagtttccgttctaataaacctactccttccgtaagtgtgcctgtgttgtcttatagttactttgtttaatatcaaagatagcatggagatactcatggctcactgtctggttttgtaggttataatcaaaccagcttactgtagtctgggtagcattgttaaaaacagcagactataacagctgtcaccgtaaaagaaaacatcattgattcagtttttttttaaaggtatattaacgtagataaaaaaatgaggtccagaatgttggtgcttctgaaatgagagtagtttattttgttgatgatatcttcattcagctggctaggacttaacgtgtgtttcatgatcatttcctcttttccgtttctgagtgcatattatttcctcatttgatattacttttttttattctaaagcagtggttctcaaaaagtcaaaatgattttcataataatactaagcattatttgatttttccttttattgacatttacattgctggtgcaaaagcaatagtgtgtaaaaattgctagctgccttagcatgattcaaggcagtggcaccagactgtagtagtagtcactgtattcttcactgccatgcactcacagtaagcaaaatgaaacaaaaaaattgccagtttttacttaagaattcccttgatgaagtaggaagttttaaattttaataaacttcaacccttgagcatgtctctttaatattttgtgcaacagcagagaaagtatgcctgaagcatttctgcatactgaagtaggatggttgtttcaaggaaaattacttgtgcagatgtttgagttgtgagctgagctagttgctttttttctggaaagccatttttagtgggaagaatcacagactatcattattcagatttggttgtttggtagacacttcaacaaaaccacttcaaggaaaaggaactggcagtatttgttgtcagtgataaaatttgagctcttgagtagaattttggaaaacttgtatttgccaacttgagatcgacagcttcccagtagtactttaagacttttctgatgagattggtggtaatattaacagatgtgacttttgatattaaataatgaaatgacttgacatttggaagatttgcataattcagtaaagcaatatttccaatggaagataaaaatcatacatgtgtaaaggggttcatttaaagtgcaagaaggactaattgattttgatttgtatgaaaaattcattgatagggtttcagattccatgatgcagctacctttaagaaacttccacttgttgagtttgatatgaaaaggcaatgaatatgctccccccttttctaattatatatctatagtgagatcagattttcatcatgtacttcaattaaaacaacatatctcaacaggttgaaggcagaagcagatatgctaatccaactgtcttctactaagtgagacattaaagagatttgtaagaatgtaaaaccatgcaacttttctcacaacattgtgtttaaaaaatatagctatttttataactatatgttattatgtaatggcctatttttaaatgaatgtcttttttcagtttttatttataatatggtaaatatcagtagttataacccacataaataaaaagttctttagagtcctcaagttataaatgctaaatgggttgtgaaaccaaagtctttgagaactgctttagtttgtgattgagaatcataaatttattatttattggattaattagaaactttctctaaagagctatattagctctaagattagatttaaactgtttagagaggtttaaacatggtgtatctgccattgagatgaaagacagaacatggtgctagaacaaatatgaaaccagaaagataattggtcaggtaagaagagaatttaacacgaggcagctgagtctatgtctttgaaagctgttctagccaagtggaatggttttcagggctagactggctttcttacttgtttcttttcaaatggtatttctttgagaactcattctttttatgtatgtttgatttatgaatagaacagagtcagtgactttcacagtggcaagaactactggaatagcactatcctgattgtgttacattacttattaaatgtttacttcttgaaactgagggttttatttttgtagttgaggatttgtttcttaatttttgtagtggcagaacaatttgcttttaaaaatcaaggaagaacaaattaaaaatttcaagctcaatttcacatatattctctaaaatatatataacatgaatttagttggatctgaattttttttattcatttgaacagataagtactgtgtgctttgtgcccaggtgtaggattatctctgacctaatgaagtctcctgcctgatggcaagacaattgagcaaacacttcaaatatggtataatcactgtttaatgcaattctgtgtaaggtacaggccctggggctacttggagtagtttaagaaggcttcacacaggcagtagtgctggacctgagatttaaaagctgcctaggagttcgcctggtgaagaacttccgggagggtgacggaagttcacggaatgacatgtgtagaggcattaggcattagaaagtatggcttgtttgggaaagtagaaatattatttctgtagtatccagtgcaaggatgcatgttaggagatagaacaggacagggatgtagggtcacatcataaaaggactttattgtgtaaacacattttaattatgtctggaaggttgcagagagcctttaaataattttgagcaagagattaacaggatgtgattagtattttaaaagacatcaatctggtaacagggtagaaggacctttagtaggagctgaggctggagactagagatcagtagataatacagagactgcctcaagagttcagggtggaggtgatgcctgataggaatttgagtatgaagatttgtaagttgagtaagacaggtattggtaaatgccagaatgcagtgaggcagtgttgaaagagaatgaggttttaaaggaattcctaatcgaattcagtgtacagtccaatgtacatgttatgcccacttaatgttctttatatccttgagtcattaaataatttgcttgtgaagtgtatcatccagaggaagtcatctgtgggcaacttaccctttcatttcatttgtatgcctatgttcctaccatatgtttatcaaaaccttcttctgaaagttttatattctgtcattgttacatttccaatattttggtaatattgaaattaaagtgtaactttgtaaagtcattaatattataaatggcattgggaatggagattttatccaattttagtataattacacctgccaatttattttctagattaaagaaggttattctttacaatagaaggttattctagactaaagaaggtttgtaaatttgtctttatattgaagtaacaggtcagtttagaataaggtaaggtgagttgtgccaaaatttgctgttaggaaaaattctcttgttttcttttctgtcctgtagtctgctaacttgaatcttatccttttctcactaaaatgcttccactgtgaaggacgtaaacgtaaaaagcacaaaaaacattttaagaaaccttttaaaggtcttgatcgttcaaaaggtaggtaaaagtagttttatgccatggtgttgtttatacacattgccactttatttctgatttggaatgtgaaatgaatgtcagataacagtataaattcaaaaacaagttttaagttggaaatgcatattaaaatataaataaagacactattggctgtaatttccattgagtagtaccttagctatcctttggttattaattttgaggtatatgagaatttcaactcttgagcttgtatttttctattttttaatagataagccaaaagaagccaaaaaggatacatttgtggaaaaattggcaactcaagtaataaaaaatgtacaagtaaaaatcacagatattcacattaaatatgaagatgatgtaagtaatttttatttactcagttaataattaaatatgtattttataatattcttgacttttctatatgtggattatctgtgcccatttttaaatccgagattaatttttttcttatgagtacactaccatatcttcttgtgttagcctcgttttattgggcatttatgtacataaatatactataaaattaccatgtgttcctttctgaagctgatataagaggtttttggattgtcttctgttattttttttgaattttattttacgtgttaagacataatattataactttaaggaactaatttttgctttatgctgacaaaagagttaattctaaaaggtgatgaataactaatgataatgttaattggccaaaaagtgactaaaatctggtcacttgactgtagtctcattctctttacataccactgagttggattgaacacccaaaattattcacacacatgtgcaacagtagttgcacagaagaaaccaaacttcactcataaccaaaagagtaacatcagctgattaagaactgtttaactggctaattttaattaacatacaacacatattttgaacaatatgcattgctttgtttaaaagtttgaaacatgtaagaacttgaattttttcgtttatctaggaacctggaaatgttcattgcttctaaaaatgagtttgcattctttttgtttttaatttgaattgaattaaagcaatactgacatttgtagaatttgtttttcttttcttggtaagttccctatgtaacttgataagtcagcaggacacatttgtagattgtcaaaaaataccacctctgtcttatactgacttgatttatggagtcattaaaatgaattgtgttaacaaataaatgtcttaaaaaaacctcactcataaatgcctttgttaataacaagcttaagaaaataaagtatactcaacgcatcatgaaagtggaagaattatcattaaaatcctatgtcgagaaaagtgaacctgggtacaatgttggtgggaatgtaaattactacagccattttggaaaacagtgtggagtttcctcagaatctaaaaatcaaattactgtatgatctagcaatcccatttctaatttgtaaaattaaactttatcatacgtatgtatatataggaaaaaacctagtatatttagggtttggtactgtttgtgtttgcagacatccactagggggcttggaacatatctccagaggataagggggaactgctgtatatatccaaaggaattgaagtcagtatgtcaaagagatgtcagcattcccttgttcatttcagcactattcactatagagaagattgcccatcagtggatgaatgggtaaataaaatgtgtatatacatattggaatactattcagcctttaaaatgaaggaaattctttcacttgcaaaattatgtattaagaaatgggtgtagagaaaatataataatttatcataaagatgctcactggataatagctgtggtttgtagatagtacattagcaactgagggttgtctttaataaaacaaatgagtttcttcggaaagagctgcaggtttattttgagctggttatctctaagtataaaaagagagtgtgggaataaaggaaaatattttgccacaaatcattgtatatctgatgttaattaaaatgacttataaagctattcgtacttctcaactgtaccacatggatttttttccatttagaaaattgtatgtgactaaactctggagtcccagttggatgatttagaacattatccatttcccttctccttatttcccttagtttctgccatgaccaaacaattctataagacttttctttaagatgtctaaaatggtgatactgtgcacactgtggtatagtttaagcactgtggattgcaacttagatattgaagatcagaaatacaacaaaaacttaatgttgacagattttggatatagagactaaagaaattaaatattaaggatctagagattttcctagaagcattttgaagtgttaagaacattaaaggcttaaagagatagttcatatttccaagtatgaaagccttttttttaaaatgtgtaaatttaaggagtacaagtgcagtgttgttacatgatatactgcatagtggtgaagtctgaacttttagtgtctccatcacccataatatacattgtacccattaataaatttcttatcatttacacctacttctcacccaccctaccctttcaagtctccaatgtgtattattccacacactgaccacgtgtattcattatttagctgccacttataagtgagaacgtgcagtttgtttttctgcttctgggttgtttcacttaagataatggcctccagttccatccatgttgctgcaaaaaaacccaaacaaacatgttttccttttttatggctgaatagtattccactatgtaccctaagtgttattaaaatgatttagtggcagtgttatctgtaacaccttttaaaatttatctgtgaaaaaatctttgattatacacataaaaagattattcctttttaactgtctagagagaagtcttgttagtcatagttagtgagtcatcttctagtatgaaaagagttccactgggaaaggatcttattggtagcatagaaatgttatgtctacaaaatatggataatcccagccatgttattacctccttcccctgtgttttccacaaatccatttgggttgtatggcttaacctgtaaacacatttccctctgctgcctattgtaaaggacatggattcgccttcaccatcagcatattttactgttatcttttcttctttggtaggtcactgatccaaagcggcctctttcatttggtgtcacactgggagagcttagtctactggtaatgtttgctttattttaaacttctatggaacctgtaaagtattattctgaagtcacagggtaaattgtctagaatcaactatgcgacaaagaactatgattttttaaatatattatcatgctaaacaacttttctagaagtttaacatttttagtgatgctattattacattttaaaattatttttgtctttctgtgtaacaggtatcaaaatatcattatcaaatgatttgaaagaaataaaagctgtatcttaaacatgtgggggaagtaggggaagatgaatttctgtagagtcatgtactcatcttcggtataggtagatggaatttctaaatagcttatagatatgcatatgtttatgtatgtgtgtgtgtgcgcgcacactcatctcattgggcaatatgtaaattaatttattttgattattttataatgagtttttcttttaatggtctttaacagtagacagtgtgtgtctgtatatatatacacacatacatatatatatatgtatatatatatataggctggacatttttatttctattacaggcaactaagtggtaggaaacatgttttggggcatgtatggagaggaagatgtggttcacttagatacttttaaagttaaggacagtacaggaattgaattcagctctgcaccaagcagacccaatagacatctacagaactgtccaccccaaatcaacagaatatacattcttctcagcaccacacctcacctattccaaaattgaccacatagttggaagtaaagcactcctcagcaaatgtaaagaacagaaattataacaaacagtctctcagaccacagtgcaatcaaactagaactcaggattaagaaactcactcaaaaccactcaactacatggaaactgaacaaccttctcctgaatgactactgggtgcataacgaaatgaaggcagaaataaagatgttctttgaaaccaacgagaacaaagacacaacataccagaatctctgggacacattaaaagcagtgtgtagagggaaatttgcagcactaaatgcccacaagagaaagcaggaaggatctaaaattgacaccctaacatcacaattaaaagaactagagcagcaagagcaaacacattcaaaagctagcagaaggcaagaaataactaagatcagagcagaactgaaggaaatagagacacaaaaaacccttcaaaaaatcaatgaatccaggagctggttttttgaaaagatcaacaaaatcgatagactgctagtaagactagtaaaggagaaaagagagaagaatcagatagacgcaataaaaaatagtaaaggggatatcaccaccgatcccacagaaatacaaaactaccatcagagaatactataaacacctctacgcaaataaactagaaaatctagaagaaatggacaaattcctcgacacgtacaccctcccaagactaaaccaggaagaagttgaatctctgaatagatcaataacaggctctgaaattgaggcaataattaatagcttaccaaccaaaaaaagtccaggaccagacggattcacagccgaattctaccagaggtacaaggaggagctggtaccattccttctgaaactattccaatcaatagaaaaagagggaatcctccctaactcatcttatgagtccagcagcatcctgataccaaagcctggcagagacacaaccaaaaaagagaattttagaccaatatccttgatgaacatcgatgcaaaaatcctcaataaaatactggcaaaccgaatccagcagcacatcaaaaagcttatccaccatggacaagaaggcttcatccctgggatgcaaggctggttcaacatacgcaaatcaataaatgtaatccagcatataaacagaaccaaagacaaaaaccacatgattatctcgatagatgcagaaaaggcctttgacaaaattcaacagcccttcatgctaaaaactctcaatagattaggtattgatgggatgtatctcaaaataataagagctatttatgaaaaacccacagccaatatcatagtgaatgggcaaaaactggaagcattccctttgaaaactggcacaagacagggatgccctctctcaccactcctattccacatagttttggaagttctggccagggcagtcaagcaggagaaagaaataaagggtattcaattaggaaaagaggaagtcaaattgtccgtgtttgcagatgacatgattgtatatctagaaaaccccatcgtctcagccccaaatctccttaagctgataagcaacttcagcaaagtctcaggatacaaaatcaatgtgcaaaaatcacaagcattcttatacaccaataacagacaaacggagagccaaatcatgagtgaactcccattcacaattgattcaaagagaataaaatacctaggaatccaacttacaagggacgtgaaggacctcttcaaggagaactacaaaccactgctcaatgaaataaaagaggacacaaacaaatggaagaacattccatgctcatggataggaagaatcaatatcgtgaaaatggccatactgcccaagataatttatagattcagtgccatccccatcaagctaccaatgactttcttcacagaattggaaaaaactactttaaagttcgtatggaaccaaaaaagagcccacattgccaagtcaatcctaagccaaaagaacaaagctggaggcatcacgctacctgacttcaaactatactccaaggctacagtaaccaaaacagcatggtactggtaccaaaacagagatacagaccaatgaaacagaacagagccctcagaaataataccacacatctacaactatctgatctttgacaaacctgacgaaaacaagcaatggggaaaggattccctatttaacaaatggtgctgggaaaactggctagccatatgtagaaagctgaaactggatcccttccttacaccttatacaaaaattaattcaagatggactaaagacttacatgttagacctaaaaccataaaaaccctagaagaaaacctaggcaataccattcaggacataggcatgggcaaggacttcatgtctaaaacaccaaaagcaatggcaacaaaagccaaaattgacaaatgggatctaatttaactaaagagcttctgcacagcaaaagaaactatcaacagagtgaataggcaacctacagaatgggagaaaatttttgcaacctactcatctgacaaagggctaatatccagaatctacaaagaactcaaacaaatttagaagaaaaaaacaaccccatcaacaagtgtgcgaaggatatgaacagacacttctcaaaagaagacgcttctcaaaagaagacatttatgcagccaacagacacatgaaaaaatgcttatcatcactggccatcagagaaatgcaaatcaaaaccgcaatgagatatcatctcacaccagttagaatggcgatcattgaaaagtcaggaaacaacaggtgctggagaggatgtggagaaatagaaacacttttacactgttggtgggactgtaaactagttcaaccattgtggaagacagtgtggcgattcctcagggatctagaactagaaataccatttgacctagccatcctattactgggtatatacccaaaggaatataaatcatgctgctctaaagacacatgtacacatgtgtttactgcagcactactcacaatagcaaagacttggaaccaacccaagtgtccaacagtgatagactggattaagaaaatgtggcacatatacaccatggaatactatgcagccataaaaaatgatgagttcatgtcctttgtagggacatggatgaagctggaaaccatcattctcagcaaactattgcaaggacaaaaaaccaaacactgcatgttctcactcataggtgggaattgaacaatgagaacacttggacacaggaaggggaatatcacacactggggcctgttgtggggtcgggggaggggggagggatagcattaagagatatacctaatgtaaatgacgagttaatgggtgcagcacaccagcatggcacatgtatacatacgtaactaatctgcacgttgtgcacatgtaccctagaacttaaagtataataaaaatatatatatatataaaataaagttaaggacagtgaaccatatatcataccagacaagtttgccttatgactacttatatggagagggcctcaataaggaaagaagaggaagaagaatggtagggtggtagactggcagagaaacagaaaaagaaggacatggttatgtggaaggcttcacaatgttgtgggcatatagagaagtagagatacacatcgcattgaagaacagagcagaaacaataaagaaaaagagagagctgaagaaacaaaggaaaggcagtgaaggaaactagttttttttttttttttttttttggacttctttttttattttttatttttattatactctaagttttagggtacatgtgcacattgtgcaggttagttacatatgtatacatgtgccatgctggtgcgctgcacccactaacgtgtcatctagcattaggtatatctcccaatgctatccctcccccctcccccctcccccgaccccaccacagtccccagagtgtgatattccccttcctgtgtccatgtgatctcattgttcaattcccacctatgagtgagaatatgcggtgtttggttttttgttcttgcgatagtttactgagaatgatggtttccaatttcatccatgtccctacaaaggacatgaactcatcattttttatggctgcatagtattccatggtgtatatgtgccacattttcttaatccagtctatcattgttggacatttgggttggttccaagtctttgctattgtgaatagtgccgcaataaaccataaaaaccctagaagaaaacctaggcattaccattcaggacataggcgtgggcaaggacttcatgtccaaaacaccaaaagcaatggcaacaaaagccaaaattgacaaatgggatctaattaaactcaagagcttctgcacagcaaaagaaactaccatcagagtgaacaggcaacctacaacatgggaggaaactagtttatcctttgcctgtttccaaaatgaatttgaggtagctttcgacaaaaacaagtatacagtaacacctttaaagaggatagaatctgtgttctaaaggatagagagagaattgttccagaaaactgtgactaatgatagtggtcataagggagcagagtaactttgagcttctagcagacaatgcaaaaaatacaaaatagtcatatacctcctattgtctgataacaggtatactattgcataagaatgggtagtttccttagtgtttgctgctgtttgtccctttgtatctttgctcagactcttcattctgctttagttgtctgtattactttctgcctggtgattctactcaagttttaatacttaagtaatatatgacctttctttctcattctttttcacttccttcttagaatttaccattccctcttttatgcttcctattgtattttgtcaaagacctgtaaaatattattgtactggttatcatgttaatctccttctgtcaaaaccacattcattcactgaagtagtacctaccttttagtgtttttgtgatgattaaatgagatagtttatgtaaagcttttggcacattgtctggctcaattatttcctgctattatagtggctattataacaactacagcaatagtaaacctacctcttttgtatccataccatttatttttctttgcaattacaatctaacttataaatctaaagttatcctcccacctctgatctggatctcattttacctatgtgctcactgtactctcactctactactccactgaaacagttcttaacaagtttctcaataacgcccttgctgctaaataagtttagtgtttggtgttgctgaacatgctgtccttgtagaaacttggtcatgctgtaatttccatactctcctggttttcttcctattacaaaacaattacttgtttttttaaaaagaatgtataccatattcaatagtgtataggctggctgtctgttttcattcatacccgattctttccacagttcaaatacatattaacccagtaattattttctgaatgaatgaactcaaattagaatcatgtcaattctcttttcattgtttctttgattttgtcttataaatatatgtaaagaaatagatagctaatactagttaacattaagtagatgtcatttcttcctaaattattttgttacattatgtaagtattagagcgctattaatgacatccataccacgtttcacaggtattcccttttttcttttagactgcaaatgaacactggactccatgcatattaaatgaagcagacaaaattatatacaaggtattatgttggaataaaaatttttgttagtttcctaggtgcacttaatttattttcttgaagaaacattgatggagcagaatatgccattggagtgtgagttaaaagtctagggtctagttttggccctgctacttactatgtgaccctctgtaatcacttaccagttctgagatataggttctttacctatcaagtgaagatacaggatacagttaatacttcccaaatggtactttattagatattgagatattttgagatgttgtagagaaaatattctctgatcaagtaagattattgattaaagtactaagctatacataattaaacagatacgtttcattttattttaaactatagagctttagatatgttaacaaacactgtgaatctccaagagggctatttagtatgtagctttcccaccttgttgaccatagactcctctgctaccacctgttttcaggaaacagctattcatatctgctggagggatcatgtcttttttttttcagcaaaatatttacagggtctgttaaatactaatttctgaataaatatttgataattgaatgaatgagttccttggaaatagtgttcttgaaagtgcaatttagcaaatgctagacttaataaagtctgaataacatgaatatattttcccctcatttttatgttattttctttcctttaaaaattcaaaatggcatttgggtaattttggagtggtgaacatgagaataatcttttaatattgattcataatttcagtgtgttgattgcctgatctctttcatttttctcttatagcttatacgacttgatagtcttagcgcctactggaatgtaaattgcagcatgtcttaccagagatcaagggaacagattttggtaatattaatgtatacttggaagagctaacttcactcccatccctaaatttgtttaatataagagggccttcatgaggacaggatatcagccatttgtttaacttgtatttcactaaatcagaaatatgaaaaacatcctttcaaatccactatgtgtcttcacaaaagcagttttgtttttgaagatgtttgtgaaatcattcactgggcagtgatatcagagcccatggtattaaattaaaactgtatttatgcttttttacattctcattttgatgacattcttgtcacattctgatatttcatatcagaatgattaagagtattataaagataatatttctcagatataaagcatgtatctttgacacatgttttagacatttgtgatgattttctgaatagtagaagattaattcaaaacttcaatgtgctaaaccagtcttagccatgtttatttacttagagattaaagaaagaacaattcaatttttagaactggataaatttcaatcttctatctctgatttctcagaaagatactgtaacatatgatttgcctgtgactagaatgtgtctgaaatcgcagtgtatggatatacatatatgtacattttttcggagtcagagtggacatactacaaggttgtttgtagacatacagaattcttaaaattatctgcttctgtatctttatacttataaataatgctccgtgtatttttcttattgactactagtaacagagaagcaaagatattgatgaagaaccaagctttgtgtgtgtgtgtgtgtgtgtgtgtgtgtgtgtgtgtctgagtctgaatatgtgtgcattttctttttcattctcattcaaattttttgtttaggatcagctgaaaaatgaaattcttacaagtggaaatatacccccaaattatcaatacagtaagtaatagtaaaagtttatttcatgttataggaagaaacatagaattaaatacattattttaacatagttttctgataaacttacttagtcaaagtatattaattttataccttactattatgatacaacatgtttgggttataacttattatttaggaatagatcgtaacacacaccactggagaataagagagagagaagggcagtatagctgtagttcattccctacagccaactttctttgaattccatgtattcttcttagcttgctactgtattctttgttttaggatttagattttctttcttttttcaaaaagtaactaaatctctgagattctggtattcaggtcacccttatgttactattgcagtgttaacataatcctgccactctagagaatttttttagtgagcttttctatttcttggcagcctcacctttattttacaactggatctctaacaaagcttcctgttatttatttattttttccatctgttttctttatttcagtttcatggtaatgaagctattggttttttattagtatacccctttatgatttttctcagctttcatactcacgttgttccgtattactctggttcactgttgttttcttcgtgttcttttataactaattgacgctggataatagttggcacttatgttacatagatccctacattttttgatgataaaactttcaagtgctgctagtttgtgaaatcatttaggttcattaatggtaataaatagttaaggaaaatctacaatttcattcttaggcattttccatttataactagcttttaaagcagttgaaaattttgtacagtcttatgcaaattgtaattaccatgagatatcacagtttttatagtttgatactattcacagttaaaatttatcaccttgcattcccctatcatcttccctgatacacctttttatattacttctcaacttgaagattattttctttagttgattctaaggttatatacgtaatgattattttgacaataataaagtggtgagcagtttctttttttggaatgaattttattcatgattttgttactaaattctgctagtgattaaataagacaaatttatcagatcttatttccttttttgtattagtatttttaatgaataatacaatcattaaatgtcttgcaacaaggaagagaagtctaattttatgcagactgtgaataaccaagagtagattgtctgtctcttttatacatttcttacctagaagcatgggattccaatttcctccttggagatttcgctttaaccatcgagcttattattatgcatataagtagaagcttaaattgcttaaatattttttggtagtgattttgttacacacatttttgatcatttttctttacttctagagtaacagtgttctcataattatttacacttgtttatatgtaaaagcatatgaacatatcttatgtcttcccatgtgatgtaagttttccagccaatatcagcctctgcaaaactctacatgaatccttatgcagaatcagagctcaaaacgcccaaactggattgcaacatagaaatacaaaatattgccattgaactgaccaaacctcaggtatgattcatgtggatatttccagctttgatatagccttgaatcttgacagcttttatttgtgattattacttctctagtggttggtggttttttggggtttgttatgttgagatttgactgtttaaaaatttttgttttaaagaaaatgaatttcaaatttaagtagttttttaaaattttatttcatcttttcctaaagtgtggagaatcatatcaaactgcagggaatgacattatttccatttgactcacaattgttgatggaagattttttttttttgagatggagtctcactctgttgcccaggctggagtgcagtggtgcgatctcaggtcactgcaagctctacctcctgggttcatgccattctcctacctcagcctttagagtagctgggactacaggcacctgccaccactcctggctattttttttgtatttttttagtagagatggcgtttcactgtgttagccagggtggtctcgatctcctgacctcatgatctgcccgcctcggcctcccagagtgctgggattacaggcgtgagctaccgcgcctggcctgttgatggaagattttaatgtgtttttccctcctcagtttttaatggaagagactcttattaaatattgtttctttaatttttagaacagctatgttggcagctttttcctctatttgtttcccaagcatggttatatgcccagagagttggggtgacaggcttggtgaactggaagtgaaaggaggacaggagatttagctaatttagcttttttgtacaattctgttaaataaaaatgtaatgcaagttgtaattttagattttctagtagctgtgttaacaatgtaaaaagaaaaaggtgaaattaactttcataatacattttatttaacttaatatttccaaaatattaatcatatcaacatataataaatgtaaaaagttataatgagacatttcacatcacttaaaatacatttaagttcagactagacacatttcaagtgataaacagccgcatggtaggtaacctttagttagaactgcattccgtgaaaaattagagaggaggaagctagacttgcccccttttttttttttaatcttctctgctttcatgttacctctgggtttatgtttccctccatttgaactgttttgtcatatctacacagagttgctgtgttgatggtaagatggctgcttaaatagctttatgttgctttggttatgcaataattttttgcagtaatttcaaaatcagctcatagacagctactgctgaaatgatgatccagaggaaaaatatatagtcttagaaacaggcatattttatatcatagtttacagataccatatttcattgtttctaagatgttcatttagtttgcattttaacatttgaaaataggatgtgtatatatattggtgataagacaatttaattaacagcagttttcttttgtagtagaacctaaaattatattacaacttaaaattgatagtgtcttaaatttgatgaactgtagtatacttgtaattgatagcatcttaaatttgatgaaatatagtatattattggactaccaggcaacattgttcagggtatttggagtctcactagcctaaaaaatagaattaaatttagtcttttttttatatatacagtgtaataaatataattttatttttgttttaacagtacttaagtatgattgaccttttggagtcagtggattatatggttaggaatgcgccttataggaaatacaagccttatttaccacttcataccaatggtcgacgatggtaagttagaatttgttttttgttttgtgaggaacatataatcatatatttagttactctcagagttaagcaacctttaaaagccaagtaattcagccactttaaaaaaagagacaagagtattaaaagacaaatggtaaatatattgattacttataaaaacagctttcacttcttttgtatgtccatattacttttttcatatgaacatccacttgtatttctgctcctaggttcccaaattctttttttttttgagatagaatcttgctgtgtccccatgctggagtgcagtgatgtgatcttggctcactgcaacttgtgcctccctggttcaagcgattctcctgcttcagcctcccaagtagctgggggtacggggtgtgcaaccacgcccagctaatttttgtatttttatttttttgagacagagtcttgctctgtcacccaggctggggtgcggtgacgcgatcttggctcattgcaacctccacctcctgggttcaagcaactccctgcctcagcctcccaagtagctgagattacaggcacccaccaccacgcctggctaatttttgtatttttagtagagacaggctttcagcatctcgacatcttgaactcctgaccttgtgatctactctcctcggcctcccaaagtgctgggattacaggcgtgagccaccgtgcctggcctaatttttgtatttttagtacagatggggtttcaccatgttggccaggatggtctcaaaatcttgacctcgtgatctgcccgccttggcctctcaaagtgctgggattacagacgtgagcaccctgccggttcccaaattcttaacttaacattcaagacattcaacatttttataaaagttttatcgcttatcagtcatccacatagactcagtgttataaccatactggaatgctatttcccacatgtcgttttgtgccttttggattttgctttggcaaagtctgttccttaagggttttcttatatctaagtctatttaagtcagacaattttgctgggaattgctgagctcttataggaagacagttaagaagaacaaaaaatttgacagcataagatctaaaatgtcaagacttttcctgttttctcttaaacctttatattaacatttacgttaacaaaatttgattttcaggtggaaatatgcaattgattctgttcttgaagttcatataagaaggtatacacagatgtggtcatggagtaacataaaaaagcacaggcagttactcaagagttataaaattgcctacaaaaacaagttaacacagtctaaagtctcagaagaaatacagaaagaaattcaggtatatcttgcatatattagtgagagctattatttgtctaatcatcctttaatattcttctgcatgtaatttgaatcaaaaaataattttaggaagaacagaattcacctctttttgagagagaattatgtgggaaaatgcagaattttttttttccagtttttcttctttaaaaaaactttttttccccctgcaaatatcagataaaataaggttactgtaaacaatttggggaaaggtgtctggtttttataataatgtttaggaagtcagtatcagagctgtttaaatatgtgtttattagatagatatatcttgttttgttagtaaacatcctgtatttatacggtagtggcttttcaaaatacttcaaaatattatttataaaaaacagcttttactaagaagacatttatgcagccaaaaaacacatgaaaaaatgctcatcatcactggccatcagagaaatgcaaatcaaaaccacaatgagataccatctcacaccagttagaatggcgaccattaaaaagtcaggaaacaacaggtgctggagaggatgtggagaaataggaacacttttacactgttggtgggattgtaaactagttcaaccattgtggaagtcagtgtggcgattcctcagggatccagaactagaaataccatttgacccagccatcccgttactgggtatgtacccaaaggattataaatcacgctgctataaagacacatgcacacatatgtttattgcggcactattcacaatagcaaagacttggaaccaatccaaatgtccaacaacgatagactggattaagaaaatgtggcacatatacaccatggaatactatgcagccataaaaaatgatgagttcatgtcccttgtagggacatggatgaaactggaaaccatcattctcagcaaactatcgcaaggacaaaaaaccaaacaccgcatattctcactcataggtgggaattgaacaatgagaacacatggacacaggaaggggaacatcacacaccggggactgttgtggggtgcggggagaggggagggatagcattagcagatatacctaatgctaaatgatgagttaatgggtgcagcacaccaacatggcacatgtatacatatgtaacaaacctgcacaatgtgcgcatgtaccctagaacttaaagtataataataataataaaaaaaataagaatttctttaaaaaaaaacaaaaacaaaaaaacagcttttacttctcgggaaagaagaggtcttatgtactcccttttaaaaggtagaaacacggccgggcgtggtggctcacacctataatcccagcactttgggaggctgaggcgggcggatcacctgaggtctggaattggagaccagcctggccaacgtgatgaaaccccgtctctactaaaaatacaaaaaattagctgggcgtggtggtgggcacccgtaatcccagttactcgggaggctgaggcaggagaattgtttgaacctgggagctggaggttgcagtgagcccagatcctgccattgcattccagcctggcaacaagagcgaaactccctctcaagaaaaaaataaaataaaataaaaaataaaaaaaataagcactaaacatggaaaggaacaaccggtaccagccgctgcaaaatcatgccaaaatgtaaagaccatcgagactaggaagaaactgcatcaactaacgagcaaaatcaccagctaacatcgtaatgacaggatcaaattcacacataacaatattaactttaaatgtaaatggactaaatgctccaattaaaagacacagactggcaaattggataaagagtcaagacccatcagtgtgctgtattcaggaaacccatctcacgtgcagagacaaaaataggctcaaaataaaaggatggaggaagatctaccaagcaaatggaaaacaaaaaaaggcaggggttgcaatcctagtctctgataaaacagactttaaaccaacaaagatcaaaagagacaaggccattacttaatggtaaagggatcaattcaacaagaagagctaactctcctaaatatatatgcacccaatacaggagcacccagattcataaagcaagtcctgagtgacctacatagagacttagagtcccacacattaatgatgggagactttaacaccccactgtcaacattagacagatcaacgagacagaaagtcaacaaggatacccaggaattgaactcagctctgcaccaagcggacctaatagacatctacagaactctccaccccaaatcaacagaatatacatttttttcagcaccacaccacacctattccaaaattgaccatatacttggaagtaaagctctcctcagcaaatgtaaaagaacagaaattatagcaaactatctctcagatcacagggcaatcaaactagaactcagtattaagaatctcactcaaaaccgctcaactacatgggaactgaacaacctgctcctgaatgactactgggtacataacgaaatgaaggcagaaataaagatgttctttgaaaccaacgagaacaaagacacaacataccagaatctctgggacacattcaaagcagtgtgtagagggaaatttatagcaccaaatgcccacaagagaaagcaggaaagatccaaaactgacaccctaacatcacaattaaaagaactagaaaagcaagagcaaacacattcaaaagctagcagaaggcaagaaataactaaaatcagagcagaactgaaggaaatagagacacaaaaaatccttcaaaaaattaatgaatccaggagctggttttttgaaaggatcaacaaaattgatagactgctagcaagactaataaagaagaaaaaagagaagaatcaaatagatgcaataaatattgataaaggggatatcaccaccgatcccacagaaatacaaactaccatcagagaatactacaaacacctctatgcaaataaactagaaaatctaaaagaaatggataaattcctcgacacatacactctcccaagactaaaccaggaagaagttgaatctctgaatagaccaataacaggatctgaaattgtggcaataatcaatagtttaccaaccaaaaagagtccaggaccagatggattcacagccgaattctaccagaggtacaaggaggagctggtaccattccttctgaaactattccaatcaatagaaaaagagggaatcctccctaactcattttatgagtccagcatcatcctgataccaaagcctggcagagacacaaccaaaaaagagaattttagaccaatatccttgatgaacatcgatgcaaaaatcctcaataaaatactggcaaaccgaatccagcagcacatcaaaaagcttatccaccatgatcaagtgggcttcatccctgggatgcaaggctggttcaacatacgcaaatcaataaatgtaatccagcatataaacagaaccaaagacaaaaaccacatgattatctcaatagatgcagaaaaggcctttgacaaaattcaacagcccttcatgctaaaaactctcaatagattaggtattgatgggatgtatctcaaaataataagagctatttatgaaaaacccacagnnnnnnnnnnnnnnnnnnnnnnnnnnnnnnnnnnnnnnnnnnnnnnnnnnnnnnnnnnnnnnnnnnnnnnnnnnnnnnnnnnnnnnnnnnnnnnnnnnnnnnnnnnnnnnnnnnnnnnnnnnnnnnnnnnnnnnnnnnnnnnnnnnnnnnnnnnnnnnnnnnnnnnnnnnnnnnnnnnnnnnnnnnnnnnnnnnnnnnnnnnnnnnnnnnnnnnnnnnnnnnnnnnnnnnnnnnnnnnnnnnnnnnnnnnnnnnnnnnnnnnnnnnnnnnnnnnnnnnnnnnnnnnnnnnnnnnnnnnnnnnnnnnnnnnnnnnnnnnnnnnnnncaatgtgcaaaatcacaagcattcttatacaccaataatagacaaacggagcagccaaatcatgagtgaactcccattcacaattgattcaaagagaataaaatacctaggaatccaacttacaaaggacgtgaaggacctcttcaaggagaactacaaaccactgctcaatgaaatgaaagaggacacaaacaaatggaagaacattccatgctcatggataggaagaatcaatatcatgaaaatggccatactgcccaaggtaatttacagattcaatgccatcccatcaagctaccaatgcctttcttcacagaattggaaaaaactactttaaagttcatatggaaccaaaaaagagcccgcattgccaagtcaatcctgagccaaaagaacaaagctggaggcatcacactacctgacttcaaactatactccaaggctacagtaaccaaaacagcatggtactggtaccaaaatagagatatagatcaatggaacagaacagagccctcagaaataacgcctcatatctacaactatctgatctttgacaaacctgacaaaaacaagcaatggggaaaggattccctatttaataaatggtgctgggaaaactgtctagccatatgtagaaagctgaaactggatcccttccttaacgccttatacaaaaatcaattcaagatggattaaagacttaaacgttagacctaaaaccataaaaaccctagaagaaaacctagacattaccattcaggacataggcatggacaaggacttcatgtctaaaacaccaaaagcaatggcaacaaaagccaaaatagacaagtgggatctaattaaactaaaacgcttctgcacagcaaaagaaactaccatcagagtgaacaggcaacctacaaaatgggagaaaattttcgcaacctactcatctgacaaaggactaatatccagaatctataatgaactcaaacaaatttacaagaaaaaaacaaacaaccccatcaaaaagtgggcaaaggacatgaacagacagttttcaaaagaagacatttatgctgccaaaaaacacatgaaaaaatgctcaccatcactggccatcagagaaatgcaaatcaaaaccacaatgagataccatctcacaccagttagaatgggcgatcattaaaacgtcaggaaacaacaggtgctggagaggatgtggagaaataggaacacctttacactgttggtgggactgtaaactagttcaaccattgtggaagtcagcgtggggattcctcagggaactagaactagaaataccatttgacccagccatcctcattactgggtatatacccaaaggactataaatcatgctgctataaagacacatgcacacatatgtttattgcggcattattcacaatagcaaagactcggaaccaacccaaatgtccaacaatgatagactagattaagaaaatgtggcacatatacaccatggaatactatgcagtcataaaaaatgatgagttcatgtcctttgtagggacatggatgaaattggaaatcatcattctcagtaaactatcgcaagaacaaaaaaccaaacaccgcatattctcactcatgggtgggaactgaacaatgagaacacatggacacaggaaggggaacatcacactctggggactgttgtgggttgtggggagggggagggatagcattgggagatatacctaatgctagatgacaagttagtgggtgcagcgcaccagcatggcacatgtatacatatgtaactaacctgcacgttgtgcacatgtaccctaaaacttaaagtatactaataataaaaaaaaagtaaatacgaacaaacaaataatcaaaaaaaataaaaggtagaaacacactggatacataatttgcttaatgtcttatgatttcagttatagaactatttctagcaatgattcataatgtgaaaaatgagttgaattcctatttttctgaagtatatcacaatcaccagtgtgaaatattagaaaaagcgtagttattggcgtcagatggatttgggttcaagtactgacttggatatttaccaagtgtccttctgattatggacacaagtttctcaaactctcaggtctagtgttctcgtatataaaatggtaacaatatctgtcttacagagtggtgagaattgtatgagacagcacataaagcacttggaacacaggtcacctggttaatgttggattcccccacgtacttttatataaatgcctcaaatcagtttctactttagcctaattattgatttgcagaattttacattcttaaatattatgtgttttgtaatgtcaccgttagtacaatggctatgtaatgataagaatggggggagttagaagtaagaatcataaggatgataaatgtaaaacaagtcctcttcctaaatattcttgttttcatgtgcatttatgtctatgtgttaattataatggtctcacagaaaaattattttcatactatatttaatgaggatttattttcttagaaaacttattttctcttactgtaaaaaattaaaaaatttaaaagtctagaatacattcaaatttatactaatactttcattaggtcacaggtactgataatggactagatatgcctagaaatcatgaaagaaaaatttcttttatctaatgattaaatttcttgtttataagtgcctctgttttttacaggacttggagaagactctagatgtttttaacataattttagcaaggcaacaagcacaagttgaggtaatcatttttattagctgattttatgttttaaacatgttaatgcccgcttttaaacctaggatcaagaaattgaagtttcacgaggtgaggtttttattgcttaatttagtctcaggagaaaagaaactggagtactgaaaaaaagccactaatatgaaggggaaaaaaaaccttatttttattattatttttttttgagatggagtcttgctctgtctcccgggctgggatgcagtggcgtgatcttggctcgctgcagcctctgcctcccgggtgcaagtgattctcctacctcagcctcctgagagctgggatcataggcgtgtgccaccacgcccggctaatttttttttgtagttttagtagagatgggttgttgccatgttggccagcctggtcttgaattcctgacctcaggtgatccactcacctcggcctctcaaagtgctgggattacaggcgtgagccactgcgcctggccacttagaaaattttataatgaaaaatctgaaaaactccaagaagaaagtaaataaaagacatctataattctgacaacttagaatactactgtgataattttggctatcagtttttctcccatgcttatatacctgcgtatttatgctttttatctccttttttttttttttttactttttctttgtttcctcttccttcccttccttcttccttctctccctctcttctttcttttctcctttccttccttcctctttccttcactttcttcctttttttcctttctttctgaaattggaaatgatctactgataatgttttataactgcttatttattgatgccttgtgcgcagtgttccatgtcatttctaagattctgtaacatgactttttggtaatgaaaaaaaatacaaatgcaatgtaactcattgtagaaaaattagaaaatatagataaataaaacaaaaacactcatctcagaaactaaaagtaactactgttaatacctttctgtatatccttttagtcctttttatagttacagatgtccatgtacttactcatacttttaaatgagattaaggcatatacagttgacccttgaacaaactgaacgttagggacgccaagcccccacacaattaaaaatttgtgtataactactttctctctctctctctcttttttttttttttgagatggagtcttgctctgttgtccaggctggagtgcagtggcgcaatcttgggtcactgcaacctctacctcccaggtttcaagcgattctcctgtctcagcctcctgagtatctgggactataggcatgtgccaccatgcccggctaatttttgtatttttagtagagatggggtttcaccacattggccaggctggtctcgaactcctgacctcaggtgatccacccgccttggcctcccaaagtgctgggattacaggcatgagccaccgtgcctggcctgtgtataactttagattcttcaaaaacttaactactgatagcctactgttaaccaaaagccttattgataaatagttgattaacacatatttttagatgttatatgtattgtacactgtattcttacaataaagtaagccagagaaaagaaaatgttattaagaaaattataagaaagtgaaaatatatttactattcagtaagtagaagtcgatcaccataaaggtcttcacattgagtaagctgaggagtgggaggagaaagaggaggattgtctcaggggtagcagaggcagaagaaaatccttgtataagtgtactcatgccgttcaaacccatgttgttcaagggtcatctctacacttgttcatttgtttagcaagtactcactgagtgtctgttatgcttgcattatggctaaaagtatagacttgggagtcagatggtctggattctgatcccagctttgccatctactaattatatgattttgggccgtttgacccctctgtgccttagtttcctgatttgtgagatgagattaattagtagtacctatgtcttagggttattgttaggagtacctcataattcatgtaaaacacttaaatgattatgtgcctggcacatagcagttactaaacacgtgattttttttcattgtcattatcatttgcattagcctacataaatgaacaaaacagacaaaaatcttttatttatattgtagtaggggacaaggttaataagtacttcaataagaataaagtagnnnnnnnnnnnnnnnnnnnnnnnnnnnnnnnnnnnnnnnnnnnnnnnnnatctgaagaccatggggcaatcagccagaaagatatctaagggaaaggtataaccaggcagaaataataaagtgtaactgcttaaaggttttggggttggaacatacctggctcattcaggaaactaactggagtcctgagagagggaagagtggtggttgatgaggtcagagaagtaaggtagcagaggaatgggagggctgctcgtgggagttgagattgccagattgtgtagcatcttacaagccattgtgtggattttggctcttactctgaattgggaaactaatagtaggttttgaaacagggtgatatgatctggcataagttttaaaattcaccctggctactttgaaagcagactgtaggaaggaaggcaagagtgaagacagggggagcagttaggaggctattgaaatagttgagatgagtggtgatagtagctttactgagaatggttgcaaataaaggtgatcagaaagggtcagattctagatatactttgagggtacagccagtatttcctgactgactagatgtgagttgtaggagagagagtaaaaaatgcctttaaatattttgacttggagcagttggaaggatggatttgctatcaaataagagggggaagatgggagagaacaagcttgagtgagatgagagaagaccaggagttcagtttgggacctattaagttttagctatctcttagacctcagaggggcagtggagtaggcaattatgtggagttcagaagaggagtctgtgctggatatagaaatgtaggaagggtcagcacatggatttctttaaagccatgagattgcatgagatcacctcaggaattagaatagctagagaagaggagagttgcaaagatccaaagcttctattgttacaatcagagggatgggaaagaaccagcaaaggtgaccataaagggattgccagagttgtaatagggaagctgtatgaatgtaacaccttcaaattcaagtgaagaaagaatttcaaggaagagaaagtgatcaactgtgacagatgcacctgattttttaactaagataggacagaattgaacattaaacctactaaatatgggatatttttagccatgacgtttttcaagtaattttttggcaccaatttctttttattctcttcttttgcactcttgattatttggactcttaattttatattctatacatatatatatatatatgtatgtatgtaaaatatataggcaaggatgaaaacagccatatgtataagatatatgtattcatatataagatatatgtgtgtatatgtaatatatatatatgtgtgtgtgtgtgtgtgtgtgtgtgtatttagaccttttggtgctctgttcatcatttttttttcctgcagtcttttttctctctctaaggctagataatttctgttgatctatcttcaagttctgtctttcttctgtcatcttcattttgctattgaacccatcctgggagtttttaatttcagatattatatttttcaggtctaaaattactattgagtttttttttatagtttgcatttctctattgaagattccaatctttttagtaatttccagtgtgtttgcctttatgtcatgtactatagtttcagtgcctctctgatagttccagctatcagacatcgaagttatctgattactggcatctgctgattatcttttccttgagaattggttacattttcagttttatttgttttcgtatgtcaagtaattttggattgtatttttgacattgtgattattatataatctctggatcttgttataatcctctggaaaatgttgacattttgtgttagtgtacaacctagttaagttatgaatctaagttgtgtttgccttctgtggatggtggttcagatttcagttcagctctttaaacctttggtatgtaagtttgagtttgttttacacgtgaatattactggggttagtttgagacttgcgtgggtggttcatattagttcatgtggctaagacctttgctactttggtttgggttagtttcacatatgtgaagcttgtattagactgagattttgacaggttcatatacagaattaagagatatccccttctccagctctttccctgccagggttttctcacatacattctggccttcatgaactccatttactggttccttggccggaaatacggagtttttctcagggttttagctgcctgtgcaactgtgctccatgttcctctgctgtgctccatggtgaggcccttgctcagggcagagccatgtatagtagttttctatgtctgtataacaaacgtagtggcttgaaacaacacatagctattatctctgagtttctctgggtctggagtctaggtatgggttaattgagtcctctgcttaaggttttaaaatattgcaagatgttggtttgggactatggtatctgaaacgtgactgatggaggatccactttccttggcagaatttagctcttcgtggctgtgggatggaaggcttcagctttttgttgatttctggctagagctgccctcagcttctaaatatcatcttcagttccttgcctaatgggcttcccaacatagacaaccataacatggcagctttcttcttcaaaagaagagagaaactgcagcaggatggtcactaaagtcttgtgtatataacatacacattgtacacagaatcaagtatattttattacctttgccatactttattgtttagaaactagttgcaagtcatgcccatgctcaagggcaagaacattagaaatgggagattatggtggtggggtggaatggggtgggcacaacatgtgagaaaaacaaacgtcatggaaaactcagtcttgtgcaggtcactctccaaattgtgaccccttctactatttgcctgctttgcttacttttcaaagtctcgggtagatcttttttatattttgttcagaagttttatttgggttgaagatggcttatgccaccatggaactaaaactttcactgaaattagtaataaagaagtaacttaagagcaatttttatagaataatgtgggcagaagcttgataggaatgagagagcatgaacgactgggaatgggagacagtgagtaggaacagtatgattctttgctgtaagcagagcagataaatggagcagtaagtggtggacaatgtggagtcaagagaaggttttgtaacttgcttttctttctttaaaaaaattgtagtatccattttcaatgtcagcagaatcatttatctgacatcatttaagatagctgaatagaggccgatgtgatggcccactcctgtaatcccagccctttgggaagctgagatgggcagatcacgaggtcaggagtttgagaccagcctggccaacatagtgaaaccctgtctctactaaaaatacaaaaattagccgggtgtggtggcacacacatgtaatctcagctacttgggagactgaggcaggagaatcgcttgaacccgggaggtggaggttgcagtgagccgagaccatgccattgcactccagcctgggtgacagagtgagaatccatctcaaaaaaaaaaaaagatagctgaatagtattccattctgtgcatataccagaatttgcttcactgtttctcactggctatatttaattgtaagtgactctacaatgaatagccttatctctgcattttctcaaacatcccttatcttctcacaggcaaattccccaaggtacaagttattaggtcagaaagtatgaatattttaaaaggtatttgctactgctggggattgttcctatgaaagagaggaatgaatcaccggaggataacaatttcaatcctccatgacttaagttgctttagcttaaatgtgtattcttagtaccagctacagttgcttaaaaagtgaagaaagagaactaatattgggatgcagtagacaaagaaggatggatgtagaagagaaggcaatttgatctatctaacattgatttttttcattgtaatggaaagtacatagggcctgagtttaaaatgtaggcggaggattggctgaagttatttaccatgggcaacttagttggacagagaaggaagtgaaggcaccaagggggtaattgagggaaagggaaagcgctctgcatccgtcttcatcttaggcctcatttgtatatttttatttatttttggtctcatatatatatatatatgctttgaaataactataggtttacaataagtagcaaagatagttcacagaggtactgtgtacccttcacctgtttctcccagtgcttacatctacataatatagtacaataccaaaaccaagaatttgacattggtatgatgtgtgtgtatagttctgtgacagctctcatatttttaaatattaattcttatttatttttaaatggtaattgacaaacgtaggaaaacttttcttcactgttctttgttacttcattttcttcatagcctttctatgtttgaaattagtatttttgattgtgtgctttcctaattcatctctttttctctttattatgtgtaaaattttcagtttatttttaaattccttgaaatttgtagcatgctgatcacacctttaagatttcaacgctaatgctaataatggctttatctttcttttaaaggttttcagatatttaggtagagacttgggaggaagttgaatgttggggtttgtcgccatactatcttgatttctcttaggatattttaaaaaggttaatttcagttaatttttttttccaaaataaaatggcttctttaccccaaagtgtaaaaaaatatattatctatttttataaagaataatttttatggtagctaagaatatggtaacaatgaaaaaatacaatttagtgcctgcccttttaaaacttaaagctatcagtttggttaaaagagatgttaataaaatatccaaatgctttttagctttttctgcttttagatttgtaaaaactgttcatgaattcatctgtttattaagtctcagtatctaagagaggttcaaacttgaagtttctggttgcattttccctaaaagaattcatagaagattcttaaaagtggaaaaactcagatgatatacatttaattgggtgtcatttccaaaaaagctcggttttatctacttgtgaaactgttgaagcagttaattccctttatcatgatctctgctgttgaaggaaactagtttgttgtcatctcagtggttctgaaccttggctgcatgttagaatcaccaggggaattaaaaaaaaaatacctctttcttgagagagaacccactctctcaagatttgatttaattgttgtgtggtggggctttggctttggcattttttctcataaagcttctagatgattcttttgtgcagcaaggattgaataccactgagctgtggtatccacagtagctgatttgtcatttactttcatcttgcagtttcaaacagggcttgaaaatgtatatactcatccctagcttgtgacaaaagtttaacattttgcccatccttagtctttacattcaccaatcaaacctgttctctttactatagaattcaactctttacttttatcttctcttttgtattattccactttttattacacacagaggcttacaatatgttaccgattcactaccaatttcaaatactttaagtggaaaaattattgaaatttacttattcagggaatgagaacatataatctaaattacttatcccctttattttgtttatccctgtattctgccttttggttattcatccatatttctctgaaaagtgggcaaagagaaggagtgatagaaaatcaagtcaggatttgttgagaaaagagggtgaaattagatttaaggactattttaatttatatccctccttctgccactgtcctagttagcaagccagcattgtatatgaattctgaaatataattgttttaaattaatacttttttgggtgtgtttcctttcaaggaacttttcattttataaacatgcagttctggtggcttcttaacttaaaaatttggaagaatttggaagtcacattgcttagaagtattttacctgaaaccttaactatattgctcataacatgcagccttatcaaaatgctatcagttggtgtgagaagtattaataaactaatagggagactgcatttaactaaattatgttgtgagcatcatttaagatcttgactggtgcaatgttacgtagcgttaaaaaaaaaaaaagaaccattgtttttttttcccaggctacacctgaaaatgaagagggcaacattcttaaagtaaattttttaatttttatttttcaggtgattcggtctgggcaaaaattaaggaaaaagtctgctgacacaggcgagaaacgtggaggctggtttagtgggttgtggggtaagaaagagtctaagaaaaaggacgaagaatcattgattcctgaaagtaagttccaagtcaaataacttattgtacagtgttaagttaaaaaaaaactgtgtaaattatatcttccctgttgaattttattttgaaatacatttgaaataaattacctcagtatagtaaatatataagcaaatacatcaggctggaatattcctgtttatctaaaataaaacttagactaaaataaaacattgatttttttgtttgtgaaataatatttatgtcaaatttaaaatgtttaaatttaaagatctcaacatttagcattttttgttaccttttgcatagatattcaattaaaagtttcacttaagttttaaaatacttagggaattctaaaacccatatattagaactgaatttccttaatggtgtctctttgccttttcttgaccttagcaagcaaatagaatatgtttggtcaaagttgtagtatattagaggatattacctggctaattttgctttagcatttgtgtctgttgattttaggatacttgttagtttggttagtctttttagttatatttgtaaaatggaagcaattaatttcttaaaatgttgttttttcatagctattgatgaccttatgactccagaggaaaaagataaactcttcactgccattggttatagtgagagtacccacaacctaactttacctaagcaggtaattatttaagtggtttaaaggaattttgtctcattgtactatattagattgaattggattagacttactgatttttttaagtaatataaatgttattaattccactctgctacttaatggttgaatgtttcagtcaggttttaccaattaaaattctctctctaactttattttatttgattttttgagatggagtctcgctctgtcacccaggctggagtgcagtggcgtgatcttggctcactgcaacctctgcctcctgggttcaagtgattctcctgcctcagcctcctgagtagctgggattacaggcacctgccaccctgcctggctaatttttgtgtttttagtggagacgaggttttgccatgttgaccaggctggtttcaaattcctgacctcaggtgacctgccttcctcggcctcccaaagtgctgggattacaggggtgagccaccgtgcccagcctccaactttagatttaagtagttttagtgaacataagaataacctgacaaaagtacttattatagtgctaaactgaatcttaaaaaaattttatcttaaaaatttttttcaacttgtgaagcataacatatataaaaaagtaagcaaaaccaaaatgtactgcctatttgattgactaaaaagggaacaggtgtgcaattattatcaaggtcaagatttagaatattgctgtcaccttagaagtccctagatcccccatcattgcttctccaaaggtaactgttaccttgatttttgtggtaatcatatcttttatttctttttgttttttactaccaatactgttattttgttttgcatatttttaatctttctataaatggccttataaaatatatattttctgtttctagttttgttcttgtgagattcatccctgttgttgcagtagatgtattttactaactttcattgctgtatgggattcagttatttgaaaataccacatcttatttatttgtactgttgttgatgaacatttgggttgtttcttgtttatcatgaataatgctgctctgaacttgtgtcttttagtgtggatgtgtaagataacgtttactgaggagtggaattgctgagtcataggatatgagcatattaaatagttttccaatgtggaaaacacttccgctatcagtatgcgaggataattattgcttcacgtcttcaccagcacttggcattatcaatcttttaaattttagccattctaaatggggatgaatagtagtagtattaggttggtgcaaaagtaattgtaatattacggttttaatttgcatttcctggatgactaaagaggttttgcactttttatgtatgtattggtctttggtctttagatatgctattttgtgaaagtgggttttgagtctcttcttcattattaggttgtctttttttcttattggtttgtaggaattctttatatattctggatatgaggcctttgctagttagatgttaatatcttccccaaaaacgtgggttggcttttcacttttagttgtgttgcaagtctgtctgcccacaatgtaaagtacattttcattctctgttttttttttcttttgagacagggtcttactctcccaggcaggagtgcagtggcacgatcttggcttactgcatcctctgcctcctgggttgaagtgagtctcctgcctcaagccacccgagtagctggaattacaggcatgtgccaccatgcccagctaattttttgtattttttttttttttgtagagacagggttttgccacattgcccaggctggtctcaaactcctgagctcaagcgacctgcttgccttggcctcccaaagtgctgggattacaggtgtgagccaccactcccatccccattttcattcattaataatatcttttgatggctagacttcttatttttaatatttattttctttattaatcttttcctttttggctaatgcttttttggtgtcctgtttaaaagtctttcctcattgcaaggtcatgaaactatgcttctagaagttttatattgtcttactttatgtatttagatttatggtctgtctaaaattgatttttgtgtatggtgtgaagttggggttaagattcagtttttgtccatatagctgtctccttacatagcaccggttgcctttgccactgctctccatttacctctttatcatcagttaagtgtccatatttgtggaattcctgctttattccattggccatttgtctgtctttgtagtattctgtcttagttactgtaactttgtaatcagtcctttgaccttgttgtagaaatctttaaactctcgtgttctttatgattaccttttctattcttggtccttaaaatttccacataaattttagaatcagctgttcagtttctataaaaacttgagattttcattgggattttattgactctataaattaatttggggagaatttatgtctttatagtattgagtcttttaacctataaatatagcacatggctccatttatttacctctttttcattcctctaataatgttttataattttatctgtagaagttgaacatcttttgttggattggtataagtgtctttaaaatttggttgaggcagaatttacatacaataaagtgcacagatcttaaattttatttgatgaatttggacaattgaatacacctatgtggtgatcaacaaaaacaagatagagaacatttccatccttccaaaaagttcccttgtaaccctttccagtcatttttcttcttttgccttgcaaaacaaacactttataacttatgtcaccgtgattactttttccagttcatgcgttgttttgtttctatcttcttttgctcaaaataatatttttgatattcatccatgttgagtatgtgtctgtagattgttccttttcattgctgaatagtatttcattgtatgaatataccataattttttatctatttcctgttgatatatatttttttgtttctggttttggctattacagataacactgctatgaacatacttgtacaagtctttggtggagatatgtttttacttctcttgagttaaatacctgggagtagagttgctgggtcatagggtaaatatgtataacttttctaaaaactggcaaacacttctccaaaagttgtaatattttatattcctactactggttccagttgctacatattcttgaccacatttgatattgtcaggctttttaattttagccattttagcggatttgatatgttcctcgactgtggttttaatttgcattttcctaatgactaatgatgtttatacggttaggtttttgtgtcctctcccagatctcatcttgaattgtaatccccataatccgcccctcaccaccatcaagggagagagcaagtggtaataattgaatcatggggttggtttctccgatactgttgtcgtgatagtgagttaattctcatgagatctgatggttttacacatgggagttcccctgcacaagctctcttgcctgctatgtaagaagtgtctttgctcttcccttgccttctgccatgattgtgaggcctccccagccgtgtggaactgtgggtccattaaacctcttactttgataaattatccagtctcaggtatgtctttattagcagcatgagaatggactaatgcacttgattattatagttttataagtcttaaagtaagacctctgacttggttttcttttttttttttttaagagtgttttggctattttaggccttttccacttatatataccttttagaataatcttatcagtgttttcaaaagtacatgctgcttttgttagagattacattgaatctgtaaattattatggggaaaattgtaattttagcaatatcgaatattccagtcacataattcctttctttgtctttgaccatctgtcagtaattttcgttctacctgaacaataccaattatattattttgttgaatgcagttctgctggtgatgagtttttaaattttttttgtctttctgaaaatatctctatttttccttatttcttgaaggatacttttgtgtatagaattctaggttgttaatgattttctgagttttgaaggtataatttcattgttgtttggcctgcattttcttttgtgtattcagctgttagtcttacggtatcactttaaaggtaatttccacccatctctctcatttttctatttttaagaaaatctctttaccttagattttcagtaattttactgtgatgtgactagatatgtattcatttttgtttatactgtttggacttcttactgtttggacatcttgaggtttcatcaatttgggaaaaaaatcctcacttcctagttttatttcccatcatttttttatccttcatcctttggttcttctaatgtacatagtgggatcttttcataatatctcatgtgtgtcttattttctctgaggtatttccaagttctttatctgtttattctttggttagtttcctctaattctctcttcagctctttatatattactgttaaactcatttattgaattcttaattggcttttgtatatttcagttcttgaatttctatgtggttctttttttatagcttccaaattctttgctaacatgctctgttttatcttttatgtctttgaccctaataaatctagtagtctgagtaagtctaaaattagacacttgatgtctagagcgcctgtgaatctattttctgttgtttctgctggtttttgttccaatttgtcatgaatctagtgagcctgtctgtgtgtgtgtgtgtgtaccggtgtgtgtgtgtgtatgtgtatgtgtgagagtgtgtgtgtatgtgtatatgtgcaccaatcagtgttactgtaggtattgagatgatttgatgctgtgctgcagatcatgggagtctgcctgcttccagttcacctttactcttatgatatatagccctttagggtcccaggcaaaagaatgtgttttagcagtgcttttaccctttggtgggaactgatttccaattttgaccctgctagcctagcttcacaacctctaggctgtcccctttgaaatttccaaatacctctaggagaaacaggtccccaaattccaggatcatctccctggttctctgttttacctccagtcttgactcagtaattttggggtcaggatttattttctcagtgtcttactaactctgcacagaaatcaagcagatgttctatacaggtttctttccttcagccacaggtttattctgaaatacttagtttgtttcagaaaaagctgctgaattgaatctttatgccacaaaatgctttgtaattgtttcattgttataacctttaaaactaagagagggctgggtacggtggctcacgcctttaatcctagcactctgggaggctgaggtgggcagatcacctgaggtcaggagttcgagaccagtctgaccaacatggtgaaaccccatctctactaaaaacacaaaacttagcttggcatggtggcgggcacctgtgatcccagctactcgggaggctgaggcaggagagtcgcttgaacccaggaggtggaggttgcagtgagctgtgattgtgccactgcactccagcctggcaatagagcaagtctctgtctcaaaaataaaataaaataaaacttaagagaaatgaatttctagatcttttgtaagcatcctatttgagtggacaattttgtattgaattttgtaatttatagtgaataaatttgtaaatgaagaatttttcctttatggtgagcatgtggatgccagaacctgccatgctgtatttgttaggttgctttataattcagcaaatttaaataagaaattattaaagaaagtaataattatttaaactttaacaattttaatttcattctttctgtatagtatgttgcccatattatgaccctgaagttagtaagcacctctgttacgataagagaaaacaagaatattccagaaatactaaaaattcagataattggcctgggcactcaagtatctcagcgaccaggagcacaagcacttaagtaagtttttaaaaacttatttcaatttttacttttagttatagttttaggcaaaaaatgtgtgttattcaggtttaaaaatgattagtgccagctctttaatttcttttccttgtatatgtcaagatagcctttttatatttgctcttgttttgttgtggagctgtgtgggtacttcatcatttgttctgccctccctcctttcctttgtgaatatttattggatagtatttaatttataggctcaataatgtaaaagctgtggacaagtacagtaagtttttgttttcaagaaatgtatgctatagctgataaaagatatacaaaaaattaataattcaagaactatataacattagacagctctaaggtaagaaggtattgtaaaattaaatgcctcatagttaatgctacacgagcttagttgtggaagagaataactgagctaggagaaggcctaggatagctgaatggaaatgactaggagaagctggaatggagtaagagggtgttaagagtggcatagaaatagggagaggagttcatccatgtcgtgtgatcttttattcatacaacagtgatcagaacttttacagtattctaaagttggttgaagtgagtttttcacgtagatgaaaggagttaattaaaacaacaagagcagcaaaccagattgtgtgtgagcaattgaatgcctggctaaggaggttgagcttcagctctggataatgtgcatggatggtcctggttctcaaagacgtttttaaaaggaaatttgtattttagtccattagattacaaaagaccttgtctgcatctttccttgttcttcattggattatagggtagaagcgaaattagaacactggtatataacaggtttgagacagcaggatattgtgccatcacttgtggcttcaattggtgacactacatcatccttgcttaaaattaaatttgaaaccaatccggaggatagtcctgctgaccagactctgattgttcagtcccagcctgtggaggtcatctatgatgctgtaagtgcaaggagaaagtaactctttatttaaatcatcttatgcttctgacatactgttttcttatttctcctctttcatatttaacatttatttacttaataagtaagtttcctaataggtttttcttgtttcaaaagcagtatatgttcagcagctaattttgatttttttcatatgcaatacatttttccctactccaaggtttatttatctacgcctttgttaaattttaaaaaatctaatatacttttaaaaattcttgtttatttgccaacgacttccaaattgttacacgtttacttcctactccagttcttttttgtatattttctcttttctttcaatgtttggaacaaattcaaagagctttaggactgattaaaataattttaaatattgttcacaagggaaaaaagcattgatgtttagatgttattggaagttctggctcaggttctgtatctatgactttaccttttattcatgctatcttatccatcatctcaagttagtcatcagtatggatatggttcactactcattgcatcacttgtaggttcgccccaccttgttgagatccctgatgtaattttactttacgactgaaagctaaataaagtgtgtgtgtgtgggtggggggacagcatataaagactgcagaactccttatattttataattaaaaaattttaattgtggtaaaatacacgtaactcaatttaacatcttaactgtttttaagtttatagttcagtagtgttaagtacattcacatggttgaacagccagtctccagaactgttttcatcttggaaaatctctgattttttaaaagtttaaatttggcatgtaggtaagagctgaatggctttcttcctcttaattttctaaacttcaaagtgcaagggaatctaattacagggtagagaagtactgtttcatcttctgactaattggaggctaaatctagaagtaatgtctgctgctacatccatatgacgctgtagaacatactttacaccttaatgatatgtgcacatttgttgcctctccagtaagcttgcttaggctcttcctttctccaggttctcttttactccaaagggagatgtagtaggacagaatatcttaggagttccacagttcaaagctacagctgtttagaattgaggtgaaactttgaagtttacaatatggaaagaaccatgtgtaacttggttatgttaaaaaaattttcttatagaaaactgtcaatgcagtggttgaattctttcaatcaaataagggattggatcttgagcaaataacatcagcaacattgatgaagctggaagaaattaaggagagaacagctacaggtgaagaatttgagtgtctacataagcatcagctaagcttaaaaattttgcctactctaatgtaaacattgtattcaaaatattatgttgctttttttctttattttaaactcaggctgtattacagtatagagtggacatggctttctcaaaatcaaatatacctgatagactgggtgagaaagagcataatatggggcacagatgattcttcctgccattacagttaagaactcctgcttcagaatgagcttgagatggaaaacaaccctccatctcagttcttaagaaactgttaatcacactgtgtgtgaatatagtttgaaagatacttacttttgtataacatgacctctaaactcaagccaactattttatccagttccttaaccaaggaaataataaattattctatccctacataaagtactagctatgttgggtttactatactgtgctataataagattgtttaccattgactatatgcagttttcaccttacatgctgaattgagaatctaatttgtgagaaaaagtaatactcctttgtaatacttttcttttttttttattttttattttcttttattttttgagatggagtcttgctcttttgcccaggctggagtgcagtggcacaatctcagctcactgcaagctccgcctcctgggttcacgccattctcctgcctcagcctcccaagtagctggggctgcaggcgcccgccaccacgcctggctaatttttttttgtatttttagtacagacggggtttcaccgtgttagccaggatggtctcgatctcctgacctcgtgatctgcctgtctcggcctcccaaagtgctgggatgacaggcgtgagccaccgcacccgacctgtaatacttttcaagtaaaactcttattctagttgttaataatatgattacatatttcaacttgaccatctaatctgtcattatttcttacgtctttaggacttacacatattattgaaactcgaaaagtccttgatttaaggataaatctgaagccttcttatctagtagttccacagacgggtttccaccatgaaaagtcagatcttctgattttagattttggtacatttcaggtaggtatatatgcgtttttttgtctgcccatctttgacctgcttgctagctaactctccaacagtttgctgtttttttcttcagagttcactaaactaaatgtagacttattttttagcctgtgtttcaagccttgcttggagtattttatatatgttttatgactattaaaacaaaaaacctccaaattttctgtagtggtagggtgatttgacagtaaggactggattacatctgccttttcctaattagaaagaagcattcgtagttttcatagtttccagggcttaattatacagtgttatttgttgcttataaatttgacaataggaaattgtacatatatgaatgtatatttgttaaaccactgtcagtaactaagtagagcaagacaacttttggattttggattttgaatctcatagaaagccaagcctccagtaaaaggtgacaatttcaaatatatgaggggactttgaagtttgtggaaaaatggaattaaaagataaaaataaaaaaacataaactttgtttctcaatttaagatccatcaagtccaagacacttttgtaagtgatgataccagccatttagtccatctctcaaggattgagggtcctgggaatttaatcatgtcattgtagtcttttctacattactaactgaagaaaaataggtactgtttatagatttttttttttttaagattaggaaaccaaaaaaagttagaagaagccaaattaggactgtaagttgggcgcctaatgatttctcataggaaatcttatacaactgccctcatttgataagaggaaggagcagaagaagcattgtcgtggtgaagaaggactctctggtgaagttttcctgggtgtctttctgctaaaactttggctgactttgtcagaacactctcacaataagcggatgctatcgttctttgggcctccagaaagtcaacaggcagaatgcctggagcatccccaaaaactgttgccatgacctttgctcttgactagtctgcttttgctttgactggatcattttgacatcatggtaaccattgttttaattgtgatttgtccttaagatggtactgggaaagccatgtttcatctctctctctcttttttttttttttttttttttttttttgagatggggtcttgctctgtcacccaggctggagtgcagtggtgcagtctctgctcactgcaacctttgcctcctgggttcaagtgattttcctgcctcagcctcacaagtatctgggattacaggcacgcacccccacacctggataatttttgtatttttagtagagacggggtttcaccatgttggcctggctggtctcgaactcctgacctcaagtgatccgctcaccttggcctcccaaagtgctgggattacagacgtgagccatctcacccagcccatatttcatctcttattataattctttgaagaaatgcttctgatcttgatcccacacttgtttttaaaatttccattgaaagctctacccttgtctgtagctgatttgagcgcacttgttttggcttctgttgattaaaaagtttgctcagctttaatttttcagtcagaattgtgtaagctgaatcagttgaaatgtctctggtgttgactattgtttctgctgttaatcatcggtcctcttcaattagggaatgaacaagattaagtttttcttcgcaaattgatgtggtctgccactgtgggcttcatcttcaaaattgtcttgacctttcttaaaattagttatctatttgtaaactgctaatttctttggggcactgttcccatacatttttcataaagcattactgatttcaccattctttcacccaagcttcagcataaatttggtatttgtttttgcctcaattttagcagaattcatgttgctattatgggggggccattttcaaactgaagccttaatcttcttagtgactcaaactagatcctgttcagtcatgttataaaaagttagtacaagtttcttttggtacaaaacagttttgaaattcatgcatagctttttcataatgggcattttccatcaactttttgaagatcccttgtatactcctgaattgatccttgcttccaccaggaagggggaaaaggcagtacaaattggagctgaattatagtggcctaattttattcctgtggtatagtgcggagaaggaacaaaacgctgctatctaatggtgaagggtgtagggtgggggtcaggggagctggactctaagtggcaataattcctgagagccaggaagaggaggagttgtacatctagacaagttattcgaggcagacagctcaaacatgaaaatgtgctgaacacctatttctcaactttagtagagatgtatgctgaaatattatattgtttacaaataattatctgaaaattaaaatgtttattcattaagagcagtattttcaatttgttaggttttaactaactaaatgcaagactgaaacctaactaaagtatgttgatgtatgtgcttttctgttttggaaaaaaaaattgaaatttgtccttcattttagctcaacagtaaagatcaaggtttacagaagactactaattcatctctggaagaaataatggataaggcatatgacaagtttgatgttgaaataaaaaatgtacaactactttttgcaagagcaggtaaaccgttattcagcttttaggatcttgggattatgatgggtagtttgtgtaatatacgtgtatatatgtgtgcctatatatcaaccctgacaaccattttgcacacatattcttttggctgcttaaataaaccatgtaggacactatcagtgtaaattactacaacatttataaatagaaatggaaatttggctagtcatcttaagatacctagctccatttcaatctaagcctattcatagcctatgtttttgtaatgtgactataaaactgcttagaacacaaaatggaagttgcagtggattcatgtttttctgtcttaccgcttttgggatgactcaatattattttccttgctgccttcattatcaaatattatactatattagcctagtctttatttcaatagtattactagtattatgctgtctacttttgtagatatctgagaagtatgtatctacagaatagtagatatagtcttaatatattaaagataattaacttaattattttccaaaagctttggtgtttttctatgcttacgtaaatatttttgtttttttaaagacttacttagtttctagaagcaatacatatttattaattatccttgatcatagtatcacgttgtggtaggtcattagaggaaaggacagttatagtctctatgtgcagagtttatactctagtaggagtgttgagatttattaaaacgtaaatacataatgctctacttacttttcatatattaagagcctgttaattccttggagtatttacacagaccattaaaactgccttttcttttgtatttacttaagaataattggattataagtgataaaagattttcagtcattgtcatcaataaacatagaactctattagttgttggaaaatctgtttttgggaccttatttgaagaaaagtgattattatacatttttggtcatgaaattttgtttgataaaactctgctttgctttggaattgtatgccaagctgggtgtaaatattgtacttaggaaccccatacttctttttcttttttcttgtttttcctcctcttttcactgtaattatcaaccttggtcactaattctggaattgaggtaatagatcctgggctttgtttttcctgtttactttgaaatgcaagatgttatgtgaacattctccaaatagaattattttatatcacagtctttgatcctgtcagtctgtatttaaaaagcataggttatttaactgatacgctgaaagaagtgaaaattggtaatcattgattctggattaatttatagtgattttccatagaatgtctgacaatttaaaataatattcattaaaaataatatttatccatgttccatggctgtttgtaaaaataataaataatatcttaaattattttttaaagaggaaacctggaaaaagtgtcgatttcagcatccatcaactatgcatatattgcaacccatggatattcatgttgagttggctaaggccatggtagaaaaagacattagaatggccaggtaatgtataaacttcttttatattagaaaatcaacaggtgaaatatgtctgcatcagttgctagaatttaaggaagcaaagatagatttctgtgggagacagcaaaaatgattattccaatttgcagcagaaatacatttttaagaaaatgtatatttgaattatacatcaacacttatttcagaaatatttggacttttacattctgtaaaagttgatggttcatgtttttgaatgaatcgaatccaatgcttaatatcaacaaaataaaatcttcgaacacattagaggctcttttgataatgaaatcccatataatcctgagaaaaatcaaaggacataaaaatagaaaattaattttgaatttaagtagacagttatgaaatgtttatactgtttttaaaaaacagctatattgaaatataattgatgttcaataagctgcatccatttaaagtttacagtttgataaatattgccttagctatatagccgtgaaaccatcatcatggttaagacaatgaacacaccatctccaaaagtgtccttgttccccctttgtattcctttctttccttccctacttaaatttctcttcccccagtccctggacaacattggtctgctttctgacactatagatttgttagaattttctagaattttatataaatagaatgttagacttttaacttttttgtttaacatctttaattcaacataattaatttaagattcattcatgttgtatgtatcagtttattgataccctttattcagcataattaatttgagattcattcatgttgtatgtatcagtcgttcactgataccctttatcaggtggatgttaaaccaacttttcattaccgattaacctcacttggtaatgatgaacatccctaatccaaagaccaaaaatttgaaatgctccaaaatttgaaactttttgagagtcaacatgatgacacatgtggaaaattctgcacataagttcttaacacaagcttcgtttcttgcacaaaattattaaaaattttgtataaaattaccttcaaactgtgtgtacaaggtatgaatgaaacataaatcaatttcatgtttagacttgggtcctatctgcaggatatctcattatgtaatacaaatattcccaaatcttaaatacttcttgccccatttctgatactcaacccatatgtattatttttaaaaatatttttggacttgttttgccaaaattttgttacaaagttttatatttgtgttagtgagggatattggtctttgcttttcttgttttggtatcaggataatgatgttggcctcatgcattgagttttctggaagatactgtgtagaactagtattatttcttcctaaaatgctaggtagaattcaccagtaaagtcgtctggtcctggagttttcattttgagaggtatttaactacaaattcatgttttttcatagatatagggctagattatctattcttctgtatgatctgtatgttccaagtgttttgagtttgtgtgttttaaggaatttgtccatcttagttgttgaatgtattggcataaaactgttcataatgctttcctcttacctatttaatacacgaagaatctgtagtgatgttatttcttttagtcctgatgttagtaatttgtgccttttctatttttctcctgatcactgtgatcagaggtttatcaattttgttgatcttctgggagaaccagctattggtttccattatcttctctcttttgattcttttttttcctgatttcctctctgatatttattatttctttcttttacttactttggatttcgtttgcttttcagtcctagtttcttaaggtagaagctgaggtcactgatttgagaccttagtttttttccaatataggcatttagtgctttatatttccctctctacagtgctttactgtaccccagtgtggcatccagcaattaggcatctgtcagcttgagctgttcacagcttagtcaggaagccaaagataaacaacaacagctagaaagagctttatgactagctgccacaaggctattgagacaaataaacctgaggcaattacattgagtagggaaacagaatagaagcacctgccaaaaagtaagcaactgataaaagcacagtggtgattcgtagtgagtaaaacagatgtcctcatggagctgacattttaatcagaggagacataaacaaatataaatgtgatatgtcaggtgctgccaagtgctatatatagaaagaaataaagcaaggcaatgggatagaaagtgatgaggttaaatactctttgatgtttataataagaatctttgataccaggaagtagtgttttggttttgaaaggtagagaattgtgtttggaaagattttcctaaaaattagttaagttaaagagatttggctacttaagagggatatgttgaaattatctgaaaacttagctaacatagaacttcccatttcctgacaatgttgtctaaatgaggcattagtgtaattagattaaaacatgtcaaaagtttaggcatgttttaatctaattacattaatgcaattctttccctcgtttgtaatgtagagatgctgacttaaaaccactgaattgtatttttagatttaaagtgtcaggaggacttcctttgatgcatgtgagaatttctgaccagaagatgaaagatgtgctatatttgatgaacagtatacctttgccacagaaatcatcagcccagtctccagagagacaggtaaatagatacaataaaatgtataaccctatttttattgttttagagcagtgatgaaaagtcagtttcagggcaaggtttataagtgaaaggaccaaaagtacagaaatgaaagtaaaatgtctttcaaatttataatgtgttttaaataaagctagaggggaaaaaaactaacaaaaaccttctttagaatcttgcaaataaaacaattgatataaaattttcttatatgttagacttataagttctagatcactttaattgaaattgatctttacacagtagaaattttggatatctactttgaaatgaaatttgataaagccagctcatggtgataccatgtgccaaggctttacacagtagaaatgttggatttctactttgaaatgaaatttgataaagccagctcatgatgataccctgtgccaaggacctataaaaaagatgtactttaatattgtaatagacagaatgtaaatgatatacagtaataatagactaacttactagagctgggcttagttttgcccttgtagatgtgggtggtagacttaataatttgtaaattctagccaattattagttgattacacaatatatcttgttggaagatttgtatattgtgttatattgtgtgtatgtgtctttccatatctctttatcctctattactttttagtcttcctctcatttatgacatttaatcctgctaagtcatcctttttaagaaaactttttgtattctttgctaggtatcctcaattcctattatttcaggtggtacaaaaggtctacttggtacttcactattgctagacactgtggaatcaggtaaggaaagtaaaatactctttctctattaaattaagcctatacattgttatacagagataacattttcagaaaataagggcagtctgaaagtgctgtagtaatttactggttttagttctagttgtgctacattagtgtgactttgagtctcttatcccctttaagcccaagtttctgtcttcgttggacaaatgaagggtttttttttgtagttgacaatgcttacttaagattctaaataaactactttttttggccccaatctctacatgagcttttctctaactttgacctaattgatctgttttaattttgaactagaatgtaagcttcatcaggacaggaccatgtctatcgtggtcattctggtatccttactggctggcacagcctgatacgtggtagataatgcccaataaatattttgttgaatattgagtgaatgaactatagggaaaaacagaaccattgaagaaaagaacatagtgctatttgatttcaaatgtgattattacatggcaggttgagtcacttggtagaagtttaaaaaaggcagctattctgatgctgaatatgaagattatatctaataaatgaatttcactttttagagatttagatttgagtgtttcatgcagttttcaatgtacattgtctcagatcaaataaatgtctttttcctttagagtctgatgatgagtattttgatgctgaagatggagaaccacagacttgtaaaagtatgaaaggatcagaacttaaaaaagctgcagaggtcccaaatgaggagctcatcaatcttctactcaagtttgaaattaaagaagtatgtgcttttttgtctataaatagatatattctggctgtcactatcttgtaagctatcctcaagctagacccaaatgtcaagtatattaaaaatgtggtactctgtctttcctgctgcccaacacacatgcacatacacactctcacacacactctttctctctcacacacacagagatttttaacaatgaaatgcttttaaaaaaactgatgtaagaatgatctgtggcatatctaatttattctggaagagcttagacttttaattagaacttacttttctgcagaaaatttttatgacatgcctactttaattttttaaacttttcacttttaagctaaataatattgctcattatcatgtttatgatttggaaaaatgtaaacaacctaaatttccaacatacgtttacagcctttaaaagtcatgtggtaaaaggaaacatggagagatgttcacggtatgtcattatttgggaaaacaaaaagattataataccaaagatattatgattccatatgaagttatatttatatgttttctttgataaatgacagacagtgttcatctctgggtggtgagattacaggtttttatatatgcctgcttacttttacatgtattccagatttctataaaaaatttgtcttgctttgataataaaacaaaaaggatagaaaatggaggtgttccttattgactgtttcatgtgccatagtgagagcatgtcctaaaatataatgtcagaaatactacattttaactgtgtgtacacacctaagtactattggtatttgtttagagaaaggtatgttctttactgttagccttcttcaacttctctctttctccatactacatccaaaatatcattaaatcccatgaccctaaattcaaaatgcattcagatgattgctcttcctttctgctgctactgtactgtctaagtcactgtaatcttcttccctggattattttgcaatagcctcttaactgtctttgcttccatcaggtactctgttctgtcatttgccagattgatcctttaagagtgaatgtcaggccgggcatggtggctcacgcctgtaatcccagcactttgggagcccgaggtgggtggatcatctgaggtcaggagttcaagaccagcctgggcaacacggtgaaaccccatctctactaaaaatacaaaattagctaggcgtggtggtgggcacctgtaatcccagctgctcgggaggctgaggcaggagaattgcttgaacctgggaggtaaaggttgcagtgagctgagagtgcaccactgcactccagcctaggtgacagagcaagactttgtctctaaaataaaataaagtaaaataaaaataaaagggaatgtcagatcatgttactactctgctcagtatcctccactgacttcaaatgtcactaaaagtaaaggactaagtcctttccatggcctacaaggccttacatttgtaacacctcatatgactggccagttctttcctgccttgctcactctgcttcagccatattccatctatcccttcaataggtattgatcatgtgccattattaccagacattattttaggtactggaaaatagcagtgagttaagttcttgccgcatggagcttacacttgtcttatgtttttccttctgtataccaaagcacattctttgtgcttgctatttcctttgcctggaacactcttttcctgcatggcttgattttttttttttttttttttaaactaacttcaggtatttgttcaattgtcatcttattggaaagatctgaccacccaagacaagacagcaaccttcattttctccaactttccctagaatgtaaacttcatggtgataaagaatgtcttaatttgttttctgttactataacagaataccccagcctcccaagaggctgagattacaggcacataccaccacacccagctaatgttttacattttttgtggagattcggttttactatgttgcccaggctggtcttgaactctcgggctcaagtgatccgcctgccttggcctcccaaagtgctgggattacaggcatgagccaccgcacttggcctcttctttaagtatttttaaagtgttacctaagtatgtaattataacatctgctaataataatattttttgccttttttcagtatttatattattctggttattattgctgcctatcaagttaaatagcttaaaacaactattttattttgcttacaggtttgtgggttaggaagtttggaagggctcacctgggtaattttgtgcatagtctttcattcggttgcattctgatgttgactggggttgcagtcatctgaagcctcaagctggatgtccatgtggctcacttatgaggcttgcaattgatactggctattggctgggagctagctgggactattgactgaaacacctacttatggcctctcagcatggtaaaagccgtggtagtctgagtagttgaactttttacatggtggctggcttcccccagtatgagtgttcccaggtaggagtttcgtggtcttttatgacaccggaagtccttatagtatcagttcctttctactatattgatttaagcattcacaagcctgcccatattcaaagggtggagacaaagatctacaccttttgattagaatatcaaaagcacttacatcttttaaaaattaccacgttttattttttattggctaaatatacaggctataatttccagagttaacttaaatagtagtatgatagagaacatcttgtcttactttctactttaatggggatactttaaaaaaaattactaaacatgatttttgctttgaaatacaggtttaagaaaatcatatttaggaagaatctatacattcctattttactaaattagaaaaagtaaacaatgaagttaaattctgtcatgatttttttataaatgtatttatattctcaacaatagaatttaagttttgtaatttccaattatattaaattgctatggtggcagaaggatatgagcaaagttactattctcatggtgatgtgtatggagaaagattttgttttcattattttaagtatgattcagacttcttatcaacttttcattgactctaattcttttaggtgattttggaatttactaaacagcagaaagaagaagatacaattctagtatttaatgttactcagttaggaacagaggccacaatgagaacatttgacttaactgtggtatcttatttaaagaaaatcagcttggattatcatgaaattgaaggtaatacccataaaaatagaaataatagcctataataaagataggacttttgagtatctgaaacactttcatttatattgtatttataataaataatagctacactgttgtaagcactttacaagtaataactcatttaatccttatagcagtgctatggggtaggcagtgttataatctatggtttaaatgtaagtaaactaagtcacagactgattgtattaatataatttactaattgtcacagggctagtaattgactgaaccatgattaaaaccctggaaatgtggccctagggtctgtgctcttaattaatattaccttttgcctcagagagtctctaaaaatccccttgatatggggaatattattcctgttttataaacaaaggctaaataaagattaagtggcttactgaatatcctgtatttaatgaatgacaaaacttaagagtttatctctgatcatatgttattgaaggccttgttctttctattaaatagtattcatataccacaagaaacaccagattataaaaataaaaatgataggatgtaaagttagttctttcagaaactctgattgtcatataccacaagaaacaccaggttataaaaataaaaatgataggatgtaaagttagttctttcagaaactctgattgtttattcatttcagtgtatatattgtttgctcaggtatttgaggcatgtaggaatggacaaatctacagtaattaaaattccctaatatttccctaatgctttagtcaaatgcagtcgtcccttggtacctgtggggcattgattctgggacttctgtgggtaccaaaatccatggtgctcaagttccttatataaaatggcattgtattttcatataacctatgcatagccttccatatactttaaatctctagattacttctaatacctaatacattgtaaatgtaaaagagttgttacaccatgttgattttaaaaatttttgtatttttaattttttattgtttttaattttttttaatatttcaatctgaagttggtttatactatgggttggaatccttggttacagaacactgactgtataaagacctatgttttataactttttaatagttgaaactaaaacaaatctcaatttagaagaaaaatattttatgtgttagtaatttctataggacctgtgttaagataaggtttacattattgtcttgagggaaaaatataaataataatttttctaggctattttttcctttagtgaaggttatgcccttggaagtcaagggaaaattttaagctctctcagaagcaagagttaaaagaattgcaaataacaaaagatggataaaatggtggacaaattacttctccttccacagcttttggaggcagttccttggtacatctacctcaggatataaaggacatctggtagtacctgttgtttttaagttaaaaaggagtttaacagttctctcttaaggaaaaaaaacaaaaacaaagctttcctcttttaagtcacctctcacagtttaaacaaaaggaaattatttaaatttctttaatagaagtaaaataaattatttgtcagaattttagaagtcacctgtgaaatcaggtgaaaataaatatgcatgtttttaagtaagttggatgtcagaggtaacaatttggattggttaatttcttcaacagtgatggcctttgtatttaatagctatgacaatatgcaaagattttcttttaaagcttaattaacaaatttttaaaaatctaaaatgtttcaaattacaaaagagcaatttatttgaaacacttttttttcctttttctttaatctaggatccaaaaggaagccccttcacttgattagctcttctgacaaacctggattagatcttttgaaagtggagtatattaaggtaagggctatagaatgattatatatttattgtttactccaaactatttctctggaaggaagaatatgacagtaagttactaatggctctggatgtgtatcacagtttctaattagagggaaatctgtttcttttttcatttgtacaccttcttttctttcacttaagtacggggctattattatacaaagtcactaaacttcttgttcccagagatggaagcctgggatgaagtaggtaccatttgtcttctagggcatacccacatacctgtactgattataggtcatatataggtgacatttggctgagtatcctgcatcaaaaaggataaagtcatattaaattgggttcagaagacaaatgccatgaataggaagggccacgaaaatatttcgtatgagaaacactgaaggaactgatggtatttagctgccttcaagatgaatcgatttgtttaatcagtcagcagctatttattgaatacttctggatgtgtttttggatgtctgtactgttaggcgcttgggatacagaaatgaaaaacattccctgttctcaagaaaattgtagacgagtagggagataacacaagtaaataatgattagaatataatgtgattgattccctaataaagaaaagcacaaagcattattggaacagaggggcagggaaattggcaaggccagaagacttctcacaggaggtaaatctttgagtttgaatttgtttatgttcccaagggatagaaagaactaggaccaatggttagttatgatgggagacagatttttgactcaatgtgaagacctcattaaataaaagctttctaaagattagttttgtaaagaaacaaggtttcttttactggagatataaaaaaatgtagacttgctgacgactttatggagggatttaagcattaggggatagatgggctacgtgactgtgacaccttacaaccttcagagtttgtcattctgattcttagctacagtttcccagaaatgaatattctcccatgtttgaagaggagaacacatttgcactattataataaatacattatttggatgtaaatttaaaataatggcaataaaattaaatatacagtgtatataaaatacatttataactataaataaattaaccagagataataaataagtgatttatttacttcgatcctagtaccttctttagaacttttacttcttttttcaggctgataagaatggacctagttttcaaactgcttttggaaaaactgaacaaacagttaaggtaagaaattctgttaaaggaatttatcctgtttgaaaataacctagtctcaaagcctctagtatcctttgaggagtattgactaggtaatttgatgacataatcaaggaccaataagagttataaataacctcatcgatacttaccatgctctgtgtttatgattcagcttagtaaagctgttttgttatatcacatcctagcgtccttaaaagtttcagtattatttctaaattagggaatgctgtagacaaaagaactttgatgtacaaagaactaaaaggtttctaaactagccaaactagataccattgtttgatgtacaggtgaaaaagtgtataaaatataaggagacatgttgagcacttttgaagtcaaagcactacttacgtagtagcttagagtaagaggggcaaaatgtacttatgggtaactaaaaagaaaaggagagaggcgagttttagctcacacttttttgagagatggggaaatctgttttaatattgtgaaccttttattgtttttatatccatttagtgttatgagaaaatgaaaagaaattcatttttataaacagagctttttattttatattaatttgctattagaaaactacccattcttgaaatcaatttgtattgctattttagcttcctagagtgattgctttaaaaaaagtagtacttttcccctacaagttctatattgtgtttctttttaaatgataacaccattattgtgatttgaaaaggtcacttagtaacccattcataattgtcctttttatatttaaatttcacggatgccacctttgaagtcatttctagacatagtagtagcacatggtggttctgggatttcgccttttgacttataattttatataatcataattgtccattgaagatccaagaagccgtctgtatgttgaatatcagcatagccatgagaagcagagtatagacttcataaccattatgctttggaaatggagtaattaggttactgtaatattctgatgtacccctgaagtgtataagtgtaatttttctctgtatattccctttttaaggggattgtgaatcttccactttttactcttccttcagagtggtggaaagcaatgatgtaagcccacctgagaatcttttgggtctgtcgtggagactacaggttataattggctgtggaaaactaattttctctttaaaacatttttaggtggccttttcatctttaaatctgttgctgcaaacacaagctcttgtcgcttctattaattacctcacaaccattattccatctgatgatcaaagcataagtgttgctaaggaggtacaaatttcaactgaaaaacaacaaaaaaattcaactctgccaaaaggtatgaaacatacatttttgttttttgttagcaagggttttagaattctaaagctaaatgaggaatactagagactatctgactcagtcatttaaataccattttccccttttcttcaaattaaattatatgcgagcacctgatgtataaggcaaatgtaatcaatactgttgtttttaaaaatgtttcttttagttcttattttggtggtggtgtaggaagcccttaggtaggtaatagggggagaagatctgtatttatactgagctcttcctccccgctcagtggctcctgaaggggctttataaagagttagtctttctttccattttacacataaggaaattaaggctcagagacacaaaggtagggaagggttcaggagtagcatctaattggccaagagcccagattttggatcaggaagaactcagttcacatcctgattttgctacttcaaccatgtaaccttagacacattatttaacttttctgaggttcagtgtccttatttatttattgtagttttttctcttgcttttaaattataaaagtaatatctcactattaaaaatgcaaactttacagaatatataaagcaaaaaaagtgtttgaatctttaagagttggagaatgttataattttttttaacataacagtggttcacttaatatagcgaataaaccttaaaagaatgtagatgactagaatctcaccatgtgacagatgctttgttttatttttagcgattgtatcctccagagatagtgacattattgatttcaggctatttgccaagttgaatgctttctgtgtcattgtttgcaacgaaaagaacaatatcgccgaaatcaagattcaaggtaaaagttcacacggcattgaaaattggcgaaaagataaacttttccttctttttgtctctttgcaatgctaaagaatgtacaaataaagggctctaagctgtgaaacctgaaaagacgtaattggattgtatgcttcctctatttgggatatagatattggtcagaatctgaccatcccaattgacctctacacatatcctggtgtttgggaccttcctgagagttatctaggaagtggaaaagggatactgatgtcaatgtaggaatgctattgatgggctaggagaagtgtcagtctagattttaggtgaaggtctgtggacgtgctttctagtaactttttaatcttttttttttaccttcatatgatttttatatataattatgtatttgtctttatttgtctttccttatgaaaagcaatcttataatggtgacaatatctatgagcccattatgttcttttaggtaaaagctgccaaaactcatctagcttttcctctggcttacttttactagcttgttgtgacctggtagaggtcaagaatatgttgaatatgtttaatgaaattttttaagaacttaaaaactagaaaactaggggcttttttcctttgtcctttccaaactggcagcgcatctactagtctgaatttgatttgtgaaacttttatagtttccatgtaaatgactggatataaggtataaaggataatttacttaaatcctgagataatctatttgtactagatgtatttcttcccctgattgaaaagtcacataatcattgtttaatgaatttataggttttggtgtttataaaaccaaaaaactctaatattgcaacttatttatccattgggagttgaaacattgctaaatttaaaaaagtcaccccaaaataaaataatgtaatggaaagaaagatcttatttatggtaggtctgtagaaattataataatacactctttttttcaggactggattcctccctttctctccagtcaagaaagcagtcactttttgcccgactagaaaatattattgtcacagatgttgatccaaagacagttcataagaaagtaggtgattgtaaacagatagttaatattctttaatgactgaatatgagcttctattgtaaaatgtattttattttaaaaacattaatgaaatatatttcaatagaaaaatttttttataaagattataaatgtaaagccttttgtaaatgagattttattttgtcattaccttcccggatagagtacattcaagtctctgtttttcaggctgtgtcaataatgggaaatgaagttttccgttttaatttggatttgtatccagatgctactgagggggatttgtatactgacatgtccaaagtggatggtgtgctgtctctgaatgttggctgtattcagattgtctatcttcataaattccttatgtcacttctggtaaaataattatttgtatattgatttttcaactttgaaatattttaaaagtgtgataattatgatggcaaatgttataaaccttggattttagagtgggcattattttaattatatttatgcgtgaatgtagagatcaaaacccctatttaacagttgaaaagtgaatcatttaatgatttttgtctagaacaaattatttttgctacaatataatgaagccagattctttagtataaaaattattggaaaaaaatttttctctgttccttaaccatataacattagctcagttcaggcagctcatagttatagatggattatccgtaatttcttaatactgctagaaaaatagggctcaatggaaagttaaatattggaaaaaaaaagttaccacatgtatgaaaagaagatagtgttattattgatgtgcctgtattctctttgaatttctctttttatgctttgtgtccacagaacttcctgaataatttccagacagccaaagagtctctgagtgctgccactgcccaggctgcagaaagggctgccacaagtgtgaaagatcttgcccagaggagttttcgtgtttccatcaatattgatttgaaagcaccggttatagtcatcccacagtcttctatttccaccaatgcagtagtggtagatcttgggttaatcagagttcataatcagttcagtctggtgtctgatgaagactacttaaatcctccagtaattgatagaatggatgtgcagctaacaaagcttacactttataggtatgctctttcaataattatggatttaaatattatattcatgatttccatgaaattttatgacttgaaattcctacccaacacagtttattcaaataaactgttccattacacggaacagttttttttattgttgtcattgttttgtgtgtgtgtgtgtgtgtgtgtgtgtgtgtgtgtgtgtgtgtgtgtgttttgagttggagtcttggtctgtcacccaggatggagtgcagtggcgtgatctcggctcactgcaacctctgcctcctgggttcaagcaatcctcctgcctcagcctcccgagtagctgggactatagacatgtgctaccatgcctggctaattttttttgtatttttaatagaaatggggtttcaccatgttggccaggctggtctcaaactcctcacctcaggtgatccacctgctttggacccccaaagtgctgggattacaggtgtgagccaccgcgcctggcccagaagagttttttattttgtgttttgagatgaagtcttgctctgtcgcccaggctggagtgcaatggtgcagtcttggctcactgcaacttctgcatcctggattcaagtgattctcctgcctcagcctcctgagtaactgggactataggcacgtgccatcatgcctggctaatttttttgtatttttcgttatagagatggggtttcaccatgttggccaggctagtctcaaactcctgatatcaggtgttctgcccatcttggcctcccaaagtgctgagattacaggcatgagccatcgcaccaggccaccagaacagttttttaatcaacttttgttttaaaaaatttcagacctacagaaaaatggaaaaaaatagtactgtgaatgcacctacatatccttcatctagattcaccagttgtttatatttgctttaacctatctataaacatatacatattatttaaaacattttttgctaaatcatttgagaatagacatctttaactttttgtccctaaatactttatcatatgtctcctataaacaaggacattcattctcttatattaactatgatataattctagaaatttaatatcgatgtaatactataatctgaaattcagtcaatattcagattttaccagttgtcccattataataattcgcattataggaatgtccattataaaaatttctccctgattcaggatcacccatagcgtataattgtattctgtactattgaggaagatttctgtactgacagaaatttattttggagtagttcttcagcttttctttgtctttttatgactacatgactactactgtagttttgaagactacagtccggttccactcacctctcaatttggttgtgtctgagtgattcctcatggtttgattgaacttacacatttttggcaggcatgttgtgtaaattattttgtatcttcagtgctcataccaggtggcacatgaaatctgtacataattcattttaaaattattttctaccccatccatgaagatttaattatgtagaataaaaaattaatgactacaaggcaagtctagaaaataatcctagagaaaacctttatgaaatgccttggaaaatgctaactcctcttgttcactttgccatcattttcttcagtctctgcaccaacatacctattaatccttgaacaactgtatatgatgattttctgtatttcttcaatggtgtggattgcttttaaaaacttattcaatttttcacctatctactgtttaaagaaaaaagttttcttaatggttcattgtatatcaccttttaatttgtcccttctagtggattatagattaattataggttcagttttgaaaatactcaagccacactgtttcagatcagtatttagagcagcaaataactgcttgactttgcttttttttaatatgttgcatttctaccctatatctatgcattatgtaacatttctgtttttcgtaggacagtgatccagccaggcatctaccatcctgatattcagctgttgcacccaattaacttggaatttcttgtaaatcggaatctagctgcatcttggtaccacaaggtgcctgttgtggaaattaaaggacatcttgattcaatgaatgtaagtatatgagtgaagaaaaaacttcattgttgaaattttaaactccaaagacttttagcagaaatccaaatgaaatgtagactcttttgctgaatagtataagagaaatttcagtgagactttgtccaacaagatcattattattttcagtagaatttaatctttagttaagatttcttaactttaaaatttgttatacatacatattggtagagatctgtatataaattatgtattagcatattatactatatctcatgtattatatatgtacattttgtttttagggatatctaagtagccctaagatgatgatagcattgagggaaatatttacttttttatattgaagacaaccattttatttcattggaattgttattgtttaaaaagtagaattatgcattttccaaagttgtcactttaatagaaaaggtcagatttctttgatcataattaactttcaataaacataagtcaagtcattggagccaatactgactgataaattacactggttttctataaacatcttattatctttgaaaataaaaattttaacatgaaataagtagtgcaatacttaagtgagttgtgattgtatgtaacttttcagtgttaggattattctgtccctcatgtgttgcaaatgggaatttattttctgtattaaaattgtttcattttaaaacgtaatatagttttttttttaacataatattttacaggttagtctaaatcaagaagatcttaatcttttatttaggatactaacagaaaatctctgtgagggtactgaagacttggataaagtgaaaccaagagtacaagagacaggtaagaggctgacagtaagtggcaatatacatatgtgtctatttatttatggtttagtagggaatcagcaaataaaaagtaaacaaatatatgtttacaaattgcagtttgtattaccgagtaaacaaacaagatgctattgaatgaaatcatatttggagatgattgactctcttaagctaagttgtcagttatagttttggacttttttctaagttgcgtgagttgagaggaggccataaagaagaacttcaaatcagtggtagattcttgaaataatcattgaaattgcatgtatagaagaaaccattttgagttggcagtaggttatggtagcatagtgtatctgatttttcaataaggcttggtagtaaaacatctgtaagaattgaaatggttgataaattatcactttccaaagataatgaaaagattatacagcagtaaaaatggaaagagaatttaaattattagttaccatggcccttttgacttaaagaaaaagttctagccttattttttaaggtaatatatgtgtatgtctatatatatatataaaatgttgtatacagacataaatgtataatctttagtttttttcaaacaaatggtagcatcctgtatgtgtacatgcatgtgtgtgtttattcactttgctgtttttaaaaaaatattaacagtgtatcttggtgtctattccatatctgtagatatgtatagatctgcttcattctttgtagtggctgcctggtattaaattctattgaagcatcataatttatttagcaagttcctagcgctagacatttttggttgtttttaaactttcattattaccatgttgcattgaatatcctcatacatatacttttacaagtatgtatatttctataggataacaccagttaaaaaatatgtaaatctaattgacaattaggtcagcaaataatttcgatagactaatttaagattttgacagatcttgccgattgccctccatagaactttactaaccctgcactcccaccaggttgtttttctatacctttctaacatagtatattatcacattaaaaaattttggaccatgtgctaagtgaaaaccggtatgccattgtatttttcattattaaaaaactattttactgtattttaatacatacagtgaagtatacaaatattcggtgcactattcagtgaatttttgcatatatggatacaccatgatcaagatataatacattttcagcaccccagaaggcctccctcttgccctttctcagtcagtacccaacactctgcctgcaaatccacgcagaggtaactaccattttaacttgtaatagatagattagttttgcctcttcttgaatttcgtgtacatggaatcatacagaatttactcttcgatgtttggcttcttttattcttcattttgtttgcgagattcattcgtgttgttgtgcataggagtagtttgttctttttatttctgtgcactattcagttatatgaatgtatcaaaatttattttattcattctttgatggacattcaggttgtttccagtttttagctatcataaatgaaattgctatgaatgttattgtgtgtctttgacgtagttatatacactttttttttggatacataggtaggagtagaattactgggtcatatgtgagatttgggtttagcttcagtaacttgtgccaaattataccaagcagttttccaactggttgtaccaatttactttcctagcagcaatgtatgagagttccagttgtttcacattctccccagtacttggcattgccaatctttttaaatttagcattctgatagataggcagtggcatctcactacggtttttatttgctttttgattactggtgaaggtgatcaccttttcatatggttattggccatttggatatccttttatgtgatgtaaccattctatcatacaactatttgatgtttgccttttttcttattgatatgtagttttaaaattctgaatatgagccctttgttggttagtgtgtgttgtatgcatatatgtatagaaatatcttttccctgtctgtggtttacctttcactctctttttttcccaatttttattttagattcagggggtacatgtccaggtttgttacatgggtaaattgcatgtcactgcgattttgtctacaaatgatcccattacccaggtagtgagcatagtacctgataggtagtttttcaaccctcccccagtccccccctctcccctctagtagtccccagtgtctgttgttcccatctttgtgtccatgtgtacttaatgtttagctcccacttacgagtgagaacatgtggtatttggttttctcttgctgagctaattaacttaggatgatggcctccagctccatccatgttgctgaaaaggacatgatttcattcttttctgtggttgcatagcatgtcatggtgtatatgtaccacattttcattattcagtccactgtcagtgggcatctaggttgattccatgtctttgctattgtgaatagtgcagtgatgaataggtgagggcatgtggtcgttttggtagaatgaggtatttttctttgggtatgtaccctgtaataggagtgctgggtcaaaggtagttctgttttaaattctctgagaaatctccaaactgctttctatagtggctgaactaataatgtatatttctacctacagtgtataagtattcccttttttctacaacctggccaacatctgttattttttgacttttcaatagatattctgactggtggcctttcagtcttttaatggatcttttaatgaataaaatttgttaatttcaatcaacttaaatttactggttttttaaatgatcagtattttttgttttccatttgaaaaatctttgcctattctgggaattgtttcataaaagcaaaaatatttgctagaatcatttcccctggttcacattatgtttggaacagtgatggagtaaggtgatagttaggaaaccttgcgctatgcaatgctttgtcaaaggtaatgattaacaatagcggctttctgtatggaattctggtgtagcttacactacatggttcctgtgtgttgtattagtggtcaagataatgtcaaccgcaataatggtaataactaacttaatgatattgagggacagtggcgagtgaagactgtaaaatcagactgctgaatttgggctctgccatttgtgcgacactgagcaagggactgaatctgtctgaacctcaatttgcccatctctgaaataaggacaataaagttcttatctcaaagagatgtcataagaattaaatagaacagtccatatacagaccttagaacagtgtctgccacacagatgagcacttagcaagtgatagctgttgttattttttgtattacagtttaaaacaattttattgcatttcagggtgtacgaatttcagaaacacagcatcataattatatagctttacctttgtttattaatatggcataagaggccctgacctcccactcccttttttcttttgtagtattacctcttgttgtcccccttatgattcaaccatatcaaactccattctgtttgcaaaacctatcatgtgttatcattccctggttttgctcctttctagtaatgtctccaccgtgtgaggaggtcctttgctctacttgaataatgcctcctctaatacatcctttcttgacttctgtataacagtgtcacgctttgttctgtgcttgcagtgcattttatatagagtctattaacatttgttcacttaatgtgactaggtgtggcctgcttgtttgtttgtattttaaatgtatatgtctcttccactaaaccatgagttttccaagggctagcgctgttactaatttgtggattttcattgcctctaccaggtccagaatactcatataagtccacaataaatatttgtggaagaaatttgtgaataaaagtaatgaatttcttttaaacatttcaggtgaaattaaagagccccttgaaatctctatatcacaagatgtacatgattcaaaaaatactttaacaactggagtggaagaaattaggtctgtagacatcattaatatgctgctgaattttgaaattaaagaggtgtgtaattttcatctgtttttgtaaagtgaggtgaataagtaatggatattggaattacctctactaaacttacagataattgatactgatgaaaaaaatctatgtgggctgttcacatgtagcagtgatgttttaaaaattgaaagtttgttaaggatttgggagtttataatatttcatagagaaaatgacagcatgttgtataacatgctttttaatgattttaggacagttggaatgtcacttgctttggatgtcatataagaaatgcaggaaaggacaatagtgtcagataaattcttttcaaatgttagaaactcttgatagaataaaacacaatatgcctgcattttaaaaaaaagttacattactaatatgtttgccatctgcatactcttgaggaaagatgaaatacattttcttctttattcacccatccaacaaatatttattgtgtatgcccagtgacaaggatagaggtaaaaggcgtagagtctgaactcatgcaggaaaactgttaacatttttgtaattatttcacgaaaactctgctgaggatactaattggagcttggggtgctgatggtagggagggggcatttaagcaaactgagagggtcataaaagattttccagaggaggagacatttcaatgaagtttttaaagagaaataagaaaggactataaatcatgctgctataaagacacatgcacatgtatgtttattgcggcactattcacaatagcaaagacttggaaccaacccaaatgtccaacagtgatagactggattaagaaaatgtggcacatatacaccatggaatactatgcagccataaaaaatgatgagttcatgtcctttttagggacatggatgaaattggaaatcatcattctcagtaactgtcgcaagaacaaaaaaccaaacaccacatattctcactcataggtgggaattgaacaatgaggacacatggacacaggaaggggaacatcacattctggggactgttatggggtcgggggaggggggagggatagctttaggagatatacctaatgctaaatgatgagttaatgggtgcagcacaccagcatggcacatgtatacatatataactaacctgcgcattgtgcacatgtaccctaaaacttaaagtataataataataaaataaaataaaataaattaaaaaaaattgtctgagaaaagggatcaggaaagggtctggggcaaggcagaaagaggaacaggcataaaagtgtgagtatgtgagaaagcatagtggatacagggacttgcaaggacttcctctaagatccgttttatcattaaataattttatagaggttatgtttttgctctgagctaaaaataataaagttttaagtaggctggttgcaatggcttatgcctgtaatctcagtactctgggaggccaagactggaggatcgcttgagttcaggtatttgagaccagcctgggcaacataacaagaccccatctctacaaaaaaaaaaagattttttttttaattagtcagttgtggtggcatgtgcctttagtcctggctacttgggaagcaggaggatcgcttgagcccaggaggtcaagactgcagtgagctctgattgtgccactgcactccagcctgggtgacagagcaagaccctgtctctaacaatcaatcagtcaataaacaaacaaacaaacttttaaaggaatgggctctactttttagaatctgaaatacatcctttgatgttatatgttaaacttggatgtttttctggttaatatcagagttaatgaaggtttttaagccttggtagttgaaacattgatagatgaatcattctatttgcagatatacttaacacacacacacaaacacacatacacacacacatatataaagtccataagaccttttaaatattctttgtaatatatattatgattgttctcctcccttaggacaatgattgggttaaaggggagcagtttgcattgctcccaatggatatttggcattgtttgaaaacattttctgttgccattatctggggggagaatactaatgacaactggtaggtagaggccagggatgctgcctcatatcctacagtgcataagacatttcccaccacaaagaattaccagctcaaaatgttaatggtgccgaagatgaaagagcttgccttaggagtggtgtaaaaattggctgttggtcttacagactttcagaagaaaggctgtccatcagactaggagttctgggaatcatgccaaactgcaggcacaaatagaagtacacatcttaacattgtgtgaatttcttccttatatcactctggatacttattaaattcttgacttaccttcattgcatattggtgaaatagttggtggtaatactggtaccgttttttaggttgtggttactttgatgaaaaaatcagaaaagaaaggaaggcctttacatgagctaaatgtcctgcaacttggaatggaagctaaagttaaaacctatgacatgactgctaaagcttatctaaaaaaaattagtatgcagtgctttgatttcactggtaagtgtgaaatattgtctgtgtaaattattcattaggcagatgatccctacctttttatcaacattaaacatattgatttctgtgcaattgtgttaatttcctagtacattaactcaacttttcaaaaacagtccctgggtacagttctaggggacccattttgaaaagctgggttaatttattaggaaatatgatgttttatttgttttttaaatttttaaattatgtgagttttaacatttctttttgattatgttaatatgtatttgtgaaaaatgaaaatcaaatacaaaagtatatagaggaaaaaattaatatcatctgtagtctcatgtccttccctcagaataaatactaagttatcattagtgggtatccttgaccttttaagtttctgcaataagctaacttttaaagttctgttagtgtttaaagtttataagaactctatgggatatctttaagtgaaataaacttgtattgagaataatccctactttatgtattttataggttctttataccatgatttgtttagatgagagtaatacagtagtaccataggttataccagttgtaattggtgggtactagtatttttgttttatggaatttgtttccttttttttcaaagccaggtttattgaggtaagatttatacagaacatacttcactctttttagtgtacagtcctgagttttgacaaatgtatatttgtgtacatttggctggtcctgttttaaaatgtgtgaaatgtttaattgatggatcaactttgtcttttttctcttttagactctaaaggggaacctcttcacattattaactcttctaatgtgactgacgaaccccttctgaaaatgttactgacaaaggtaactagtttcatttctaggattctttaatatttgaatatatgaagttatatatattacccttatatttaatattctcattttctctcccaacatttttctacctaaacttattgattatggtgaattttgcaagcatctgaaaatcctggatactttcattaaccttctgagttaccctatgatattgaataaatggtaataacctaaagttccattgtaatccaaagcaaagtgtgttataatctagcactttttcctactttttagattagtgtacctaatctagatatactagcatttcctccacagtaggataaggaattagagtttttgcttgtatggaatgtaagaaatgcttatgtggtcagtttgtttttgttttttttttttgaatggctttctttgcctttaggaaatatctttttactcttttaatagcatacttagaaaagtaaagaatatgtatattttcagtgtatgaatttttagtgtttgaaactcagtggtgtaattctccactatttgtaggcagacagtgatggaccagaatttaaaactattcatgacagtaccaaacagagactgaaggtaaaacttttataatttgctataaggttgggttgtgttgattatatctagcttcatagccattttcaactgtgagattgtaagttctaacgtgagaataacagtggcaataataatattcctaatttatggataaagttaagtagatactagaattggaataaagttcttacaaaaagttgatttatgttctgaaaagattgtttcccagttttgacttagatttcttgacaagtatgtgaataatacacttaaagggaattttgttactcatttttgtcaactgtggttttttggcctagcgttgatggaagcattaaacatttgaattatgtattggcgttaggattagaataagattaactgaagcataaagcaaggcctggtacagacattacatacaagcattacctgtactggacctggtacagtccatttgaacatgcataatcagcttggaactgcctgaaatgtggtttaaagcctgataatatttcctgtatctttacttaaaactcatccagttcttttgagttaaaattgtggttgcacatgggagtgagcagagagttgatttattatctggcaaggattaacattttaatagtgagttaatagtgagttcttaaaaaaataaaaattttaaaaaggcccttaattgaactgttcttgtgctacttatatctgttgaaccctgatgtaaagattttactgcatctgaaatctgcctctttaattgttcattatcttaggtttcatttgcatccttagacttagtacttcatttggaagctttactttccttcatggattttttatcatctgctgctccattctctgagccttcctcttctgagaaggaatccgagctgaaaccacttgtgggggagtccagaagtatcgctgtcaaagctggtaataatttttgaattatgatctaataatactttgaactttaataatcatataacaacttgtttttttcagttaagatgaatatttagcatgttgacattgctgctctgataggttagtttcaagagaaagaaaatgttatctctatgggattatagagcagtttagtgaggaattttaaatagatgttgtttaatattatatatttatatttcaattcactgtctagcttttacataaaatagaaattgtatgtactttatgttgatgtgtctttgtagtcttcagttcaatggaagtgagaaaggaaaaagttcagttatgattcagtcatacaaggtcacaaaggcccgtttcagttagtcaggtagacttacctggtgctcagcaattttaaatgcttagtgggacactgcagggaaggagctcatggaatagacacactcatattggtttctagccaaaactatatttagatcacacagatatgggcacagggtcctcaggcatatgacttatgttatgaaaaattaggtatgacatatcctgagtgaataaataacatttgcttacttttaagccaaatatcattttaattatttttctttcatattatataatgtcagtatttaacatctagtaattcagttttcagatcgttacgagtttgagttttacctgtattactggcatgtttggtgtaaaactgtcagtactgttagatcaggtacaaggatctgatttttcttttttttttttgagacggaatttcacttttgttgctcaggctggagtgcagtgatgtgatcttggctcactgcaacctccgcttcccaggttcaagcaattttcttgcctcagcctcccaagtagctgggattacaggtgctcaccaccatgcctggctgattttttatatttttagtagagatggggtttcaccatgttgcgcaggctggtcgtgaactcctgacctcaggtgctccacctgcctcggtctcccaaagtgctggggttacaggcatgagccaccacgcccggccggatgtgatttttttaaaccatggaacagagcaacaatttccttataaactagagtaaaagagctttacctgctttgtctttaatgtacttgtcacattaatagcctcagaaatatccttggaaattcctctcctttatattatatatgcatacagtacatacacaacacagttgaataaatgaaaaagaaatgtttaaactcacaatacactagaaacactattaacccaaagaaacagtcttccagttttgctatattgttggtctttgtggtttgattatgttacatcaaatattaaagaaaaaaacaacctgtcgtactggtgattaaggacagatactttccgtgcttttgcaatttcaatcagaaggctctatttccttccagcaagacagatttttaggaaaatggatcctaaatttatcagtcaggatctggactaaagtggatttagggcgctagtttgattgtgattcttatgcacacatacacctgcgtgcatatacattataaatttttttttggtattttttaagttggccctttatgttcatttctcaaagaatttattttaggattcttgatggagcaacagggtgtaatctggagaaatttatcatgtagttaataacatgtaagtgccatagtaaataatatgtattttattaactgggcatcaccattgcagtttatcatgagttattcttccttaatctaatatatgatacgaaaaggagttcagaatcaaaactttagaccaagagaattctagagttctaatatagaatgttttctgttttcccagaaaaaaaagttgtagtaaagtttccatctagtaaattgcactttcaaggtgctattaatattatagttgcttttattcttaatttgaaggggaacatgctaatttttgtagattggaatttgataattattccaaaatttatgttaattacatgttatcttaatggagggcattttggttcctcagagtacattgggtacttttattttggtggatttgaggttattgtatgtgttgtattatcttttccctttgctcatcagaaggtttctattattttttagtatccagcaacatttcccaaaaggatgtgtttgatttaaagatcacagctgaattaaatgcatttaatgtctttgtctgtgatcagaagtgtaacattgcagatattaaaatacatggtaagtagttacttcttgttgtaggtatttctgtttctttacataactaggaaaaatgagcttgtacctgttagatttctcatgagtattcttttggtttacttatattgaagactttgcaaacttttcaaagatgtgctttaaaatgttacaagtaaatttgttgtgattcattgctgacttgagacattccttatgcattatgcattatctacatttttatgcagttgcagaaatcattatgcctttagaaactgagaatgacaaattttttttggagggaaatcttagaagactgtttcctaatacagtttattatagaagtaagactattcatcaagtaatgttcatttatttttagttattggagcaacagtttttaataatatagtaaatgtttgtaagatcactgtttaacaaatattgtcttcctaaatgaccactgctgatcttgccaatgcagaggatatttaagtttggagaaatgtgattaattttctaaattaatttgaatttctttgaaacttggtgggtttttttttttggttttaaaatttctacaacttttttggaggagatgcctgtgtcccttaaagttattatttaaaggtattattacctttcttaggtatctcatacatgaaagttgatgccattaatgtgtcttataatgagtaatttttattcactttatatcttgtcagtatattattgaacttaaataccactggcttagtcatgtggattgggtgaaaagtttataaatgttatgtttcctataggaatggatgcctctatttctgtgaagcctaagcagactgatgtgtttgccagacttaaagatattatagttatgaatgtagatttgcagtccattcacaaaaaggtgattaaaaaatagatttttatattggaatttattttgccttttggatttgagatgctattatttatttgcacagtatacatttattatctgtcatgtaccaggcactttattaggaattggagatgaaaacggtaatagtctgctttcacattgtgtatagactaggcctcttgatacacagtgatttgtaaaagttatttctgaacagctaagtggttgatattttcactgataaaatgctttttatagaaataggaagaagttattgtcacgtaaaatgtttttagctaataatttttaatgttgaattcatatatttctacttatcaaggattctgtaatacgagaacttatttataatacattgataagggctatacagctcttttgatataataaccagttaatctaatacttttaggctgtctctattttgggagatgaagtctttaggttccaactgactctttatccagatgccacagaaggagaggcctatgctgatatgtccaaagtagacggcaaacttagttttaaagtgggttgtattcagattgtttatgttcataaattcttcatgtctcttttggtaagtttttaaaaatatatttattcctcactgaggcctaaatatctttgcttatacaactgaacctagatagtaaaaatcttcactgataaggctgtgtgatgagcacctgagtgctgaacagaatgttaatatttaaagaaatccttttcatgatgttaaccaaatgaatttttaaaattattgttttgaagatatagactgtaattctataacatttccacaggtatacattttaaatgtatgttttatgttttaatttagggctttccactgtaacttgtttaatgagatatatttaagagtatttagttaaaacaattttttgaggaaacttttcaggcatttggaggactcatattggaacttacagcttttggttatgattgtgatcaacagcatcatgaaatgcttttctttttattacttatttccatgtaactgtcatggtgtattagtccattttcacactgctataaagaactgcctgagactgggtaatttacaaagaaaagaggtttaatgcactcaccattccgcatagctgcggaggcctcaggaaactgaatcatggtggaaggggaagcaggcacgtcttacatgacagcagacaagaacaagcttagggtgaagagcctcttataaaaccatcagatctcatgagaactcactatcacaagaacagcatgggggaaactgcccctgtgatccagtcacctcctaccagttccctcccttgacacctggggattacaattcgagatgagatttgggtggggacgcagagccagaccatatcacatgggctgaaggatttaaatctgcctattcttcttagtggggctgccaatcaaaacttttaaaaatcatatttttttttcaaagaaagataatttcaactcttttggacttcacttgttaatttcagttgataatccaactattttagattcagggcatacatgggcaggcttgctacatgagtatattgcatgatgctgaggtttggggttatgattgatcccatcacccaagtactgagaatagtttttcaactttttccccctttcctccctctctgtagtagtccgcagtgtctttttttcccattgttacatccatgaaatacccagtgtttagctcccatttataagtgaaaatatgtagtatttggtttctgttcgtgcgttaatttgcttaggataatggcctccagctgcattcatgttgctgcaaaggacatgatttcattctttttttatgactgtgtagcatttcatggtgtatatgtgccacgtttcctttatctagtccactgttgatgggcacctagtttgattccaggtctttgctgttgtgaattgtgctctgaagaacacgtgagtgtgtgtctttttggtagaaccatttattttcttttggttatatacccagtaatgggattactgggtcaaatggtagttttgttttgagttctttgagaaatctctaaattgctttctacagtggctgaaatagatttgcatgaatagttatgtaaatgttctcttctctctgcagtctccctagcatctgttatttattgactttttaataacagccattctgaccgctgtgaaatggtatctcattatggttttgatttgcatttctctaattgttagtgatgtggaacattttttcatatgtttgttggctccttgtatgtcttcttttgagaagtgtctgttcatgtcttttgcccagttttaaatgggatttgttttttgcttgttcacttgttcacactttttttttttttatagattctggatgttagacctttgtcagatgcataatttgcgaacattttttctattttgtaggttgtctgtttactccactgaaagtttcttttgtagtgcagaagctctttaattaggtctcacttgtcaatttttatttttgttgcagttgcttttaagcacttagtcataaattctttcccagagccgatatctagaatggtgtttcctaggttttcttgtaaaattcttatagtttgaggtcttacacttaaatatttaatccatcttgagttaatttttgtatatggtgaaaggtaggggtcctttcaccatagaataaaacgttgtttcattcttttgcatatggctagccagctatctcagcaccatttactgaatagggaatcctttccccattgcctattttttgttgactttgtcaaagaacaggtggctgtaggtgtacagctttatttctgggttctcaattctgttcccttggtctgtttgtctgcttttgtaccagtaccatgctgtttgggttactgtagctttatagtatagtataaagtcaggtaatgtgatgcctcagctttgttctttttgcttgggattgctttggttatttgggttcttttttggttccatatgaatttcagaatagttttttctagttctgtgaaaaatgacactggtcatttgataggaataacattgaatctatagattgctttgagaagtatagccattttaacaatattgattcttgtaatccatgagcatggaatgtttttccatttgtctgtgtcatctgtgatttctttcagcagtgtttcctagttctctttgtaaagatccttcacctccttggttagatgtatttctaggtactttgtttttttgatggctatcgtaaacaggattgtgttcttcatttggctctctagcttggatgttattggtgtatagaaatgctactgatttttgtacattgattttgtatcctgaaactttaccaaagttgtatgtcagttccaggagccttttggtggagtccttagggtttcccatgtgcagaatctcatgattccttaaaagcatgcatttctacttaaaccatcatgtttacttttctagagagcaattaacttggaggtgggtgccggggaggttaggttgcttttgtaatattaatggatgtacaccaagaatattgcttctgagaatgatcttatcctcattgggaaagatttttctgtttttagttgaaattgagatgaaatacatcttattataaataaattttgactcttactaatgattacaggattgtagacaattaactgtctttcctcatgctgagtacataaaaaaaaaaaaaaaagccttatcagaaataagccggcagaagcttagtttctaagactaaactttattgctgtggcctagcagtacagaattgaacccaattttggagaagtacggtactgcccttctccctttcatttaaatttgaatttaaaataaccaacattcttaataaaaaggagatttttaaaagaactgttgcaaaaatttatcatgagaataaaataattctcaattattttatattttataaaatattttataaaatgaaaaatattttatgaaatgtaagaaagagctctttcttcctacagtaactattgttaatagctcagagtgtatgtttctagacttcactctctacatacacaaaatcataaataacatcttttatattacttttttatttagtttttaaagtaaatgctttttaaagttttttcttttaaaaataaatgccttttttcccctaaatatctgtctcttccaacagaacttcctcaacaatttccaaactgctaaagaagctttgagtacagccacagtccaggctgcagaaagagctgcttccagcatgaaagacttggctcaaaagagtttccgccttttgatggatattaatttgaaagcaccagttattattattcctcagtcttcagtatcacctaatgctgttatagcagatctgggtttaatcagagttgaaaacaagtttagcttggttcctatggaacattattctcttcctccagtcattgataaaatgaacatcgaactcactcagttgaagctgtcaaggtataaatatgtaatctaattgtgtattgcttactagaaataggattttcatacaatttttacctaaggtaaaatgttgtagtaatttgtggttttcattccttatttcttctaattatgaaaccttgaccattggcttcttggtcagtggttaaacagtcatgtatgtgcctcatggagtctgtattttcccttactacatatgtaatatgatttttttcattctataaaaattagctattataaaattatagtttactcaatacttagtttaaattttttatttttctcactttgcacgtagctatttccttttttatttttggtgggaaaaaacttcgtaatatataaaatttaagatttatttctcatttccaaaccttgtcacatttgggaattttcagtgagttatcgaaaggattagtgaatcgaaatgggacagtgttggctctattgagtgacaagagcgtttatttggttaggcaaatggttgttggcaggcaagctggaatgactattaccgtatgttcgtttaacttttagattagttgagtttcccccttgagtctggagaagtaccaataacatattaagggctaagtataagattactttcttcatcttccagttttaggaggatgtaacatttgtttgcatgacagtaaactattcgctgtatcaaacagcctttgtgaaaaataataaataatgcagttgtcatagtgtatgaaaattatgtttttgaaatcagtgttatgtaggtttggttttggatagctctgcatataaacttatgtgttgtgatttagattgatcttaaaaatgtgaaaagaagtgtattctaaaagacttctgttagcagcttttagcctttatgaaatgctgtgtggaaactgttacacaataggatagtcctcattttaaaatgtaaatttgaagtaaaaaataaattcttgtttttctttcagaactattttgcaggctagcttgccacaaaatgacattgaaattttaaaaccagtcaacatgcttttgtccatacagcgaaacttagcagcagcatggtatgtgcaaattccagggatggagataaaaggaaaactaaaacctatgcaggtaagtagctagtatataatatatgaaaatttcttgataggcttttctcattgatcatagtgcagttctagtggatatcagaatgtaggagttgctacgttattgataaagctaaaccagttttctcttagtgagcatttgtctgttgtatgtgtacttttgcccaagtaataaattgagtaaactagattttgtttcctatttaaaaacaacaaaaataaataaataaaaaatatgcaaatgaaatcatccttgtttccctcacttttctttgttttcattttagttagatatttggtaaaaccagcaaggagtctgagataaaatctgttggagtgtactaaaaatattattcttaattttggaaaattctgttaaagttttaatgcagttaaattgtaagacaatgcaaagtgatattcagacactacattcaaagcaccttagtatttttaaatgtgtagagggcccgttttaattagaaaggtgatatcattttgaataggcaaatgtgtatatttgataagcatataaatacaccattatttttaatagtgtagtttgtagaggccttgttttaattagaaaggtgttaccattttaataggcaaatgtgtatatttgataagtatacaacttttttttttttttttgagacggagtcttgctctgtggcctaggctggagtgcagtggcatgatctaggctcactgtgacctccactagctgggttcaagcgattctcctgcctcagcctcctgagtagcagtgattacaggcacccgccatccacttggctaatttttgtatttttagtagaaacagggtttcaccaggttggccaggctggcctcaaactcctgaccttaggtgatccaccctcctcggcctcccaaaatgctgggactacaggcgtgagccaccgtgctccggccacagcgttatttttaataatgtagctagaaggttgcatatcagctcagaggaggaggtgagactggttgaaggtagtcgtggaagtataggaatcctgtgattcttgtgtgcctatgtgtgaaactgttgaaaccaaacagccgaggatgggataggggtgagagagactaaacaaaaccaaacaaaaatttagtggtttaatgggttttcatacctgtgattatttcagagttggttctaacatgaaataggaaggatcaaaggagcagagttttactagggaagaagttaaaattgaagcttgttgtagaaatgaagggtttctgttcatatactagtggatatattacatgaagaacaattattaaattttgtttgtttgggcattcatagggtagcctttattccagagtatgggtaccttcttttaatttctgtctttctgccaagaggttagatcccaggactaatatttggctctccctttcaaagattagatcccaggactaatatctgacaatccctttcaaagattttgtggttataggtttgttgaaagcataagtaaaacctgaatgtctgttggtagcagaacatggataaaattttggtatcttcatataatggatgttgtaaagcagataaagtgaataaaatagaactatatcaaacaaaattgatatatcttgaacataaaaatgaaaaaagtgagttgcaaaatgatagtacagttctatcagttttatattatttcagattttcaacaggcaatataatactattatatattgtttataagagatgcagtgtgataactttaagaaaagtattcatggaaataatctctaaattaggctggtgtctttctctaagggcgaaaggagaagggaatagggtctcagagaagtacacacggggcttctgctatatctgtaatgggaaacgagatctgaaggaaatattgcagcttgttaagatttgacaaagccaggtggtagattcacaggggaagattatagtattctctgtccttttcctttatgctttttaaggtattttagaagaaacaagaaaaaaaagtaacatctgatactttagcatcaaagtattataattactttaaccaaaagcatccttattaactcaggaatgcagcaacagtggatgaggccaccactgcctaatttgtcgctgatccaggtctctctaaacacccccctttggtcatagtctgtatagttttcctgggcctgggatgcagccaagaaagggtatcaggcaggtgacactggcaagttgtttccctggtctgggctgcagctaaaaaagggtatcaggcaggtgatacctacaggttgttttgggtggatcattttgatggtttttaaagaactgtggggctgcctttcaaaattgtccttcatacttgttccccccccacccccacagcaaagtgaaagaggggtgaacttagttgcccttcagaaagctgtggtaatcttggttggtatgagaagtgggttgggatatacaaggaaattctaaggtgttaaaattacacctgttatatgaggcctggggcttaggacaagccataaatccctggtcattatcttgtacttaaatagctctgtattttcatttaaagtgggaactaggcaatttctctggtggtagggacctaatttgggggacatagggtactgtggtattcagaggagatttgctatgcatgcgtgcttgcatgcatgcttgtgtgaatttgtaagtacttgaaacaggcctttggagccactgtgtcttacataaggtagaaggataaggagcttcaaagacagtactggtttaatggattttagcagccagtagcagtttcgtttgttttagtttcttgttctgcagccatctgtgagaaagttggtattatgcctattttagagattaagaaacttgatcacgcctgtaatcccagcactttgggaggccgaggcggttggatcacgaggtcaggagatcgagaccatcctggctaacatggtgaaaccacgtctctactaaaaatacaaaaaattagccgggcgtggtggcgggcgccagtagttctagctactcacgaggttgaggcaggagaatggcgtgaacctgggaggcggagcttgcagtgagccaagattgtgccactgcactctagcctgggcgacagagcgagactccatctcaaaaaagaaaagaaaagaaaagaaacttgagttaaggacgttaagaaactttgcagcaagacagcttgaaagtggtagttgatacagatctgcctgactcaaagccctggctctttttctttttgccacacatacccttttatgaaggtaaaagataagatgctaccttcctattttttgttctttaaacattctttgtagatacatttgttattgttctaaatggtattattcttgataagttaaacaaatgttttatgtatgtccagatgcatatatactgagatgaagagctacgtagcaggagagcatctttttactatttggtagagactagaaactgaacaacactcgtcctgtatttagtttcaaggagagtaaataatatagaagaaggaactggtactggttgagatgagagagagacagaatggagatgggaagatagggaaatgggacagataggcacgggtccaggaacaggaagacatagtaacagataagccatagagagtgttggagtgccagaggcaggggcctggatatgggcgaaggcagaagtgtgtgtgcacacagtaaacaaggtgaaatacttctgttctggtatttatagtcctaactctaactctcttctttttaagtaggtgaacaattaatttgaaaaaccacaaatcgagatatagatatgatagtctacattttttttattacttagagttaacaaattattggtggtttctaggttgctctcagtgaagatgacttgacagttttaatgaaaattttgctagaaaatcttggagaagcttcctcacaaccaagccctacacagtctgtgcaggagactgtaagagtgagaaaagttgatgtttcaagtgtacctgaccatctcaaaggtataaattgatgatatttactttatggagaaaaaattggtgttaatgtcatatttatatttagtatttttctagctgtccagcacaatgtggtatgaactaattcagtattgtactacttactgtggaaattcggctggggctgggaggtatgtctgttctctgctacagggggaagggtcacttgttgttggcatggtgcttgtttaccctttacttgtgaatgctaaatttgctgaattcactaggcactgaagtggcgtatcttgagagaagaatcaagctagataggcagtgtagtaaggtcccaaattaattaagagagaaaaggaccttggtatcacatgtcatactcaggtgattgaaccatgagaaaggaaggtattcttgtaacagctttatttatctggacttattggagcgttatgtttcaaatacataagataatttttcagatcattaatttgaacctattaaaagcagtgaaccttttgaattcagccatttttaaataatttttctaaaatacaaggtttctttttgatttcttaaacagattatattacatataatttcactcttttttcataatttaaagccattgatgtgaatattatgtttaattagactgtaaataggttaatattttcatggctaaaaagagatgaagtaccccttgcccatatagtaaatggtcctggctgctgtgcttttctaatgctctcataccatcagctgttacttcaaatgacagtaatcggtaaaactaccagttgatataccatatcaacactgcttctcctatagttaggctaggtgtgttttgaaatcacacaaacaaatgactagaacagtgtgcaaggtttctggtttaagtggatagttttaagtattgcataagcttgatgaggtcaacatctccccaggtgaagtttgtgccaccatacagacaaatgctagataaaaaggctgttgttatagttagacaggaactatgtagagatgaataaactattaacaggcaagccttatgtgattaatgatctcactgtgttcagccgtgatcacgatcatgtatctggttcttgctatatggacaccgtgtcacttgggaaaatttgtgaattcaaatggaagctgcaaagatgatgaaaattagaatataaattatttctcagaaaaatagaattttctaacttggagaaggcttacgtggttaaagttacgcagtatttgtttttccagtaacttgtaaaaacagactgttctatagtatgacaaaaaattagagtcagtgttgaaaaagattatagaatcagtccgtaagagtgattgaaagcaagatctattcagtctgtgtgatctatctaaagatgagagaaaagactgacttacttcctgaagtctcatttgtctcaaaattccaaagcacccactcctttcccctgcatcatatgtgaactctgtttgattttgctattgagttatattctgttcttctgataaagaaaatggattgggtaatataggtaattaaagataatgaggctgggtgcagtggctcacacctgtaatcccagcactttgggaggccgaggtgggcagatcacgaggtcaggagatcgagacctgcctggccaacatggtgaaaccccatctctactaaaaatacaaaaaaattagccgggagtggtggcgggcgcctgtagtcccagctacttgggaggctgaggcaggagaatggcatgaacctgggaggcagagcttgcagtgagctgagatcgtgccactgcactccagcctgggcaacacagcgagactctgtctcaaaaaataaaataaaataaaataaaataaagttagtgagaggtgcattagtctagcagaaaatctgttactagctgtctaatataaggcaaagtattggactgttctgagtctccaatttcataatgtcttgaaaatggcttgtagccagttaggtgtcagtgccttgaaaattaaggcctcctctttaaaaaaaaattttttaacatagtctgcctgtgcctctttgcacatatatgctaaatatatatggaatagtcattgccatttttaaaatttaacagttggaacataattgccatttttattaattgtctcaatatgatttacagaatcccagaaagcgtcatataaatttagaataagaaattatctcatatttaaaaatatttataaaattacgtacctacttaaaagcttttaaattttcaccattagaacaagaagattggacagactcaaagctctctatgaaccagattgtcagtctccaatttgactttcactttgaatctctttccattatcctttataacaatgatatcaaccaggtatgtaatacatttctgtaattagaaataaatccttagctcttgatagtcagttttagagtgttggcttttttttgtgtgggacttttcattaaaacatttaatatgtctataaaattctatttggcctacagaatgtgcattggtcctgccctctatcttcactttgttagtgtttctaatcttccaaggctaaggcaaagtactcagggttttatttctttccaagtaatatcagcaccaaaacacattttgatttattaccaacagaagaattttatatatgagtgattaattatatatacagttttattacatagctatatatatatgtatatataacgacttaagaataatttagtagtgactttggagccttacctgattatttttgaattcatgattatccttggtatataagcattaattgtgtttctattgaataaatgttatatgtagtagattatgtattaaggatactaattaaagaattgaagagccaaggtcttatgccatgatgatttgaactaaataatatgtcagtggtattttagagagctattttttattatgctgatatttccttcagtaaatatttttaattatattatgtcatacattaatacctataatacatatggcatattttaatatccatattccgtattgattatagattcaacagtgagcatataccctaattgggcagtgagcaatatactcaaatggacattaacaacagatacagattatgggtattatatctgttaatgtccatttatatgaaatatgttcatttatatttcattttatttactacaaattatgcaatattcatacattgttactattgaatttttggcttgtatctgttatttatgcaatgaactgccttattttctaatgtttaatgctcattacaacatcagaaaatgaccttaccaaaaatgagcagttaaattcattcttcattttacttggtaccatcattctgctggttctgcagtcttagaatcttgatgtctacttttgtttcattgtttgtatgccttccttattcattgagatgctgagtactgtcaggtttttctttgaataaacatttacttttttctatcacttctcactgctgctttatttgaaactcttcttacacttgtagtactgcaatgacttccttgtttgattttttacctttcatccatcctagatattggcacaacttcagtttcctaaatgaatgtcatgtagccatttccatcttccctttccactaataaacattgtgttatataatctgaatttcatattatggaaagaaattcagtggctccaaattgtctacatcaggaaaccatatcagtaatcctatcaggaaacattagtgtgttgtcatcagcagatgtgtctcaggtcattgctattaatgattacagaataaaagtttgtgaattatttccattttcataagttaaaagcattcaaagcttgccagtaataatgtcattctgacccaattgcatcaacatactatcttgagtgagagaaggggtggagttctaaccagtgtgccaatgattgcacatacccagcacccctattatcaatgccagggtctctagtaagcaatggtgttggatgttcatcacttccctgaaggtttttgttgattggctggggtttttttttttttaaatctggacatactgagagaatttggaattatatgttatggtagaataaagatcgaggtccatttttctatacatgaaaatttaaatatttagtttgggatttgagacttcgattaggcctctgtatttctttctagttttttccctaccattctttaatcggagtatccaagcccaatcaccctgtatcctatgtcctaaagcatcttgaattgtttgttcatgttttttcttcatgtggagtgtcttctgccaccctcttagcctatctgatcccactcagcctctgaggttctgttaagttctcaccttctttatgaattttccccagccataatgatctcttcaacctctctgagcttttactatttatactctttacctaaccactaaatggcttttgtgaaatgtgagaagatataaatatgaatgaataaaatactgtatgtcacaaaatatttaatcatttacaactaatagcatcttcttgtgatgttccttttagtgtatttctattttgttttctcaaggaattagggtatatgctcattcacatcatctaccatgccttactctttcttgtaaacctcataaatcttatcactgttttttaatggaagagctcattaaatatttattattagaggcggggcgcagtggcttatgcctgtaatcccagcactttgggaggccgaggtgggcggatcatgaggtcaggagttcaagatcagcttggccaagatggtgaaaccccatctctactaaaaatacaaaaaaaaaattagccgggcatggtggtgggcgcctgtaatcccagctactcgggaggctgaggcggagaattgcttaaacgcaggaggtggaggatgcagtgagccgagatcgcgccactgcactccagcctgggcgacagagcgaaactccatctcaaaaaaaaaaaaaaaagaaaaaatttattagttagattaattgattaattgacagctctttcctaattatttttatttgcattaaactgtaaatcagataaatttttctatactaatcattgttggatattcacacatatatctatttatttgtatgtacaggtatgctcacaaacatgcatattattctctgttccattcagatgttttagcactcatacttttaaaattcatgagatcagtttgcctttaagttttgaattaagtaatatgtttaaaagtaattatataatatttaaaggtaattgattcttttgcttgaaaaatgtaccataggaatctggagttgcatttcataatgacagtttccaacttggtgaactcagactacatcttatggcctcctcagggaagatgtttaaggatggctcaatgaatgtcagcgttaaacttaagacatgcacccttgatgatctcagagaaggaattgagagagcaacatcgaggtttgtcagctctgagtttgcaatacattatttaaggttgacattgcacctgcatggctgccaggcattgctaggctagggatcatccaaaaaagatctctgtcttttggtcatacttcctgatttgaattgcattaagaagtagtgctaatatcagattcagctgctttaaaggttaagttaaagggaagtttaattataaaatggagtaacatatttagaatgggaactaagagaaaatgagttttaatagttaaatccacatggggtgatatatttggtgatgtatttttctaaattattcccagtaggcagaattttgttttaaaaagccttcaagctatggatttttccttcatcatgtttattttgatcatgtctttttaaaacagttatgcaaaatttctttcaaagttttaatagaaatagaatctcgagcgcattcacatcatcaagccgtttttgaaagggtgagttatattagctcattctaaaatgggaaatatgtaattttcaatagcctaattatgtttttatttttctcaagtaatgagacataatattttgtatctgatttttttgttgttgcttttgagaaaaactgtgttgctccttaaacttggactccattgaatacatatgggatacttgtgagccctttgtttttctgagagatgaataaatgagggaagagtgctgtcatgcacccagcttttctagtttgcaaattttgtgtctggagtagctgtccacagctctcccggcaagggtgataaatgctatcatctgttaggtagcctgctttttccagttcatgggaggacgtaggggaactatagttgagcacacttgataaacacttgatgatttgagttgtattgaatactttcagactcaaattttcgtaggatgatctttgaagataaattccttcagggaggttttatttcataaataatattaaaaggctgcctttattttgtgtgactacactgatttgttttgttaattgcccaaattcctttccggccattattggtttgtttctttagtattgcattataatgtaatactcaaaaattgcattataatgcaataacatatagaattgcattgtaagtataaaatattcagtaattgcttaataacgtatatcttgctttggagattagtagtcttgtttactaatggataaattagattctagttaatgttgacctgttttctatacagattagaaactgaaaggtgaaataaagattattgaggtatataggaaattcttcatcttttttattgttttagcaagaataaaataatgaatagcatgttttttttcagaatgattgacagaaagaatgaccaagataacaacagttctatgattgatataagttacaaacaagacaaaaatggaagtcaaattgatgctgttcttgacaagctgtatgtatgtgccagtgtggaatttctgatgactgtggcagatttctttatcaaagctgtgcctcagagtccagaaaatgtggcaaaagaaacacagattttaccaagacagactgccacagggaaggtcaagatagagaaaggttagcagaatttatctgtcatagatgacaacttgtatattttgacaagaattacaaaccagaaaaaagagaaatgaaaaatttaagaacgtaaaattagtcttttatatttaaacatattctatataaaaactttagctttttagttttttaaaacatttttaagagagaggtacagtagatattggaccaatggccaggaaagtccgctggttccaactgtgccatgaacatttctttactgatccagaaatgaagttaatttgggtcagtggttagtggcctgttttataggtggggtatcttattcaaagaaaacatgttgagaattctagcacattgaagaacaattgaaaatattaaagcagaacacggggactttggaggacccagcaggacttccctggatgtcgctttaactccttaaactctgtggaagagtttgcaaatgtctggtctaggtgtatgctgaagccactttcagctctgtacttcttttattccagcattatccagtagatcagtgattttctttattttctttcccttttttttctttccttttctttcctgttctctcctctcctcttctctcctttttttttaaaatttttttcgagatgggctgtcactgtatcacccaggctggagtgcagtggtgtaatcttggcttactgtaattttcacctcctgaggtgggctcaagcagttctcccacctcagcctcctgagtagcttgggtccacagttgtgcaccaccacacctggtattttttgtttttcggtaaacatggggcttcgccatgtttcccaggctggtctcaaactcctaggctcaagcaatccgcccgcctctgcctccccaagtgctgtggattacaccttgctcctgccagatcagtgacttttctatgttaaattataaatgtctaaggtcagatatttttctctctaatgtataacctagattggaaaactaatatgtcctggtaagaatgctatttttaaaatttacctttaatgttttttaaatagtgatcatatctgatattgctatatttatatatgcattgaatatatttatagtatagattatatgacattgactatggacttttgggtgaaattgaaagaaacaactaataataatctattttatcagggtctcttttcctcttcctgatattctttccagttttccccttcttgcccctgcaatataatatatacttatgcctgcgtacatgcacattctttaattctgataaaaagaacttcaaaacaggattattcttttttattattattattatactttaagttttagggtacatgtgcacagcatgcaggtttgttacatatgtatacctgtgccatgttggtgtgctgtacccattaactcgtcatttagcattaggtatatctcctaatgctatccctcccccctcccccaaccccacaacggtccccggtgtgtgttgttccccttcctgtgtccatgtgttctcattgttcaattcccacctatgagtgagaacatgcagtgtttggttttttgtccttgcgatagtttgctgaggatgatggtttccagcttcatccatgtccctgcaaaggacatgaactcattcttttttatggctgcatagtattccatggtgtatatgtgccattttcttaatccagtctatcattgctggacatttgggttggttccaagtctttgctgttgtgaatagtgccgcaataaacatacgtgtgcatgtgtctttatagcagcatgatttataatcctttgggtatgtacccagtaatgggatggctgggtcaaatggtatttctagttctagatccctgaggaattgccacagtgacttccacagtggttgaactaatttacagtcccgccaacagtgtaaaagtgtaaaacaggattattcttgctaggtcaaagtggtaatggtattcttgggacagggatcagattgccttatcttgctcaatctgcatttgttaataatcatttaataattagtattaattaaccaattaatattgtcagtttcaccatatctgttatagaaaaacattgagaacaacttaacaacttgtagataacatgtagtcaaatgaaaagacttaccttaaacttttctggttcctgttgcttgtttcttcagatgactctgttagaccaaatatgactttaaaggccatgatcacagatccagaagtggtatttgttgccagcctgacaaaggctgatgctcctgctctgacagcctcgtttcagtgcaacctttctctgtcaacatccaaactcgaacagatgatggaagcttctgtgagagatctgaaagtgctcgcttgcccttttctcagagaaaagagagggaaaaacattaccacagtaagaattaccttgtgtcctaatcttgggttgaagaatggcagaaacagttgattcatagaatcctagaatatgagagctctgcagggactttagagattatttattgtgaacttggggttttacatataaagatattgaattccaaagatgttaaatgacttagccatggctgctagtgacagaactggggactaccttcagaacggttttattttcattataccatcttctgttgagtagtgtttgaattttagtacaaattaatattctttttcaactgtttcttttgttcaccgtggtatacctaattaatgaatgagtgaatatttaggcttagaatgaaaaaaattaaattggagtcacttcgccaaaagcggtggtgttctgctgttattaaaagtgaatgtcaattatgttttcatattattatcgaaacatatgattttagtcagttaattaccacaccaattattttctagtattgataattttatggtaagagaatcattatattatgtgactaatttgcagtggcattttaaatgtaaaaaatttgtggacaaaatgacttgcataaagaaagtatgaagtctatactttatcatgaaatattctttgacaggatcgtctttatacatgtcaccaaaagtttatatcaattagctcttcctaattctttctcttttagagacaagggtctcactccgtcacctagcctgtagtgcagtaatgccatcttagctcactacagcctcaaactactgggctcaagtaatccttctgcctcagcctcctgagtagctaggactactagctggctagttttgtttttgttttttaattaattttttgtagagaagggggtcttgctatattgtgcaggctggtcttgaactcgtggcctcaagcattccccctactttggcctccaaaagtgccgggattataggtatgcactaccatacctggcctcatcctattttttaagaaatgacaattatgccgtactaattgctccattcagttcaggtacaagcctatttattcgtttctttaatgatatataagaatataggcttcacaatttgatgaattgacttttattctaataaaggccttacatgatatttcagactgacctgtcaagcatcgggaaactgtttacttacctaccttaccacagtctttagctcacttttatagatatttcaaaggtatattttatagaggccatcatttaaaaactattttagcagaaagaaacattttaaacagtaaatctgctttattacttaaggatttggcatgatgaaattcatcagaacggcttaaagtgattttccagtgttcacagatttctcatagttcagaagagtcttcacaacagagtctcagctaatttatttttgcttttttgcttttagtataatagcaggctgtagttaaagatcccaagttaagtaagacatggttcttgtaagtgtgtgttatgtatataatggatctatggaaatgtgaatttcatttatctgtttataggtcttgcagccctgttctttatttatggaaaaatgtacgtgggcttcaggaaagcaaaatataaatattatggttaaagaatttataattaaggttagtacttaccatattctttgagtgaaaattcttatttttcttcacgacattgcatatttgcagttgagacagtatcttttgatgtctctcataactcaagcattatgctagtcacatattcagtaatcagtaacttctaacattaaagtatatttttctttaatgcaaatgtttgtttctattttctgtaaaagagtactttttaatgtctacaaatgatcagggtagtttttctctattctatttgcatgcgtgtgttgtgggggttgagttggaggagggaagagatatggggtgggaagagaagggaagaagggatggagagaagaggttgttattactttatttgtaataagttctttttaggcttttatttgatgtataagttgattgaatttaataactatatgatttggcttcaaatatttataatgacagatgtacactagaaataattattggagtttactgttttattcactacatttaaagcattgaaaaacaattattgttttccaatggcgttcaggttctttaagtatacctcgtgcccagtcacgaatagaagatatagaatactttctgcaatctatttctctgtttgcacaaaggatacaaaaatgagtccttttttggttaattggttaatgccaataatggtagtagctttacttatataggtccgtgaccaacagtgattgaactaaggctcaaactcatttcatttgaagtaccatgtaaatatcaatttagttttttctcaatattttaaaatactggatagtcttagaatgtatattgttaatggatttacttttaaaaatatataaagtagtaaatgagggaaaaactcctcgaatttgcatattttaaagcactaggttaggtgctggtgagactttacattctttgtgtataaatttatgattgattcaaaaaacgtttttgagcttttactgtgtattaaaaaaatgtcctttacaaggcattggggatatgtagcccctgctgtcaaaaaacttaatgacatatgcgggagaaagaaagaaatcagtgattacagctttcagtgctagaggcatggccaagatgcagttgggagcacaggcatggggcctttaattcagaccaggacatcagggaaagctgtgtagaagcaggactatttgatttgagttttgaagggagattaaatagatggggagcatggaaaggtttatccagacagaactgataatatgcacaaaggcagaggtgtgaaaaaatcctttaagatttagaggggtggccgggcgcggtggcctcacgcctgtaatcccagcactttgggaggccgaggcgggcggatcacgaggtcaggagatcgagaccatcccggctaaaacggtgaaaccccgtctctactaaaaaatacaaaaaattagccgggcgtagtggcgggcgcctgtagtcccagctacttgggaggctgaggcaggagaatggcgtgaacccgggaggcggagcttgcagtgagccgagatcccgccactgcactccagcctgggcgacagagcgagactccgtctcaaaaaaaaaaaaaaaaaaaaaagatttagaggggtggtcacatatggctggagagaatggtgtggtggcgttgtaagactggaagcattaattataagtgacattaataagacacggaaaaaaagttgacaagtaagttaggaaaacaatacatactagatcctgcttttgatgatataattatatccctttacattttaagtaaggattgtgagaagtgaacaataaaggaatacagttaacttatttaacctagtatttctcaaactttgggagaatcctggctagctggttgaataggcactaggccacaaagagctctgcacattaagttaaagagagtttcaattttatcttgtgggataaaaaaattatgggaagttgatgaagattttaaacataagaatgtcatactcagatttggtttgtagaaaaattatgctggtggcagtgtggagtgtaggctgagagggcgttggccgtagaagatgtcatcagtgtagaactaaggcacagtaataggaagtgagggaagtgagcaaagaaaggcactgtccaaagataataagaggtaggatttatagatcttggggtaagtcaaaggagagctgtgattttgagtcttccagctttaataaggcaaatgtatatctttttcttcctttttttttttttcagaagatcttgttgcataccgatatttatgtgtatcttgacaaggatcacacactttggcttagttaatgtagctgtttttaaaatgaagaatttgtttacattgctatacttgtctattcacataacactgttttgctctgaattgatcagcttaactttagattttgactactgacatataacattagttatttaattccagataacctgagtagaagtcagtgttgcatgattacttggcttgacacataattttgtgttctctcttgtttttcttggttacgaatttattcaaaatttaaattagttactttaatttaaaattaaaatttaatttaaaaatgtcacttataattaatgtatgtcacttaaaatcatgtatgtatatattctcatctgggaaagaatttattataaatatttttctgctttcttttttaaagatttcacccataattcttaatactgtgttgacaatcatggctgcattgtctccaaaaacaaaagaagatggatccaaagatacgtctaaggaaatggaaaatctttggggtatcaaatcgattaatgattataacacttggtttcttggtgttgacacggcaacagaaataacggaaagcttcaaaggcattgaacattcactgatagaggaaaattgtggtgttgttgtagaatccattcaagttaccttagaatgtggccttggacatcgaactgtacctttattattggcagagtctaagttttcaggaaatattaaaaattggacttctctaatggctgctgttgctgacgtgacactacaggtatggccacatcacttaataccttcagagacttcttgaaagtgcgattttggaattaagatatacacttttcttgtttgtgcatggccactatgagtacatatgtgaatagatagtgtgttctgacatttaatttgtcgatgtattgttttttgataattattttttaaagattgatttgctaaataatttatgacaatagagtaagagagtaaaggaaaatacactctatatattgttagatgggttttgaaaatggctaatgatatataacattgattacttaataatttccctattggttacagaaatatgtaattaaagccaaaggactgtcttataattttgtgtgtatctttccaggtgcactattacaatgagatccatgctgtctgggagccactgattgagagagtggaggggaagagacaatggaatttaaggcttgatgtaaggaaatcttaaaatatctttggatagaatgatactatgcatattcattcatagtttttatttcagtgattcttaagatgtggtctaggatccttgaagcccttttaagggctctgtccatgaggtcagaactcttttcatatgtcattttcattctcattctctcacgagtgtatagtggagttttccagagactaatgaaggtgatactgcaacagattgaatgcagaacagaaacgagaatttatctgtcttcccttaaggcaggcagtaaagagatatatgtgtatgttcctcttctcactgtatttttaaaatagttatttttgattaaaaatgttatttatattagcatgtaatttttatttttaaatgaatttttaattttttttcagttttaattgttaatagagtacatattggtagataaaacataaatgaagctctttagtatactcagtgatttttaagggtgagaccagaatatttgagaattgttaatgaactcttgtgtgttatctttttatgttgttttttgagaacacctcagaaacctagatactgaagcacatttttcttgattaaaaggaacttgagtcatatattgttaagaaattgtcgtagcatacttctttggggcagccttactaaggagtcaggcactgaaactgactccacatattcttttgttaaagatgagtcacttaacctgtgttccaatttcctctcaataaagaagtaatatttttctgacctgcctttctctggcatagggaggctaacaaagaatgttttacaaggcttttgaaatactactagaacagaagctgatggaatctgatggctagttaagtgtttattatattaatattacttatttgaaggtgttattggtttaaaaaatagaaggagagaaacatttccaggtggcacctctaatagggatcagtttagacttcagggtcctcttagattgctcgtcaacacataatcaccagttgggtgacactgaataaatagctatgctctgaggaatgcataagagacaaatattgtagctggctttgagtaatttcatggcgtaattctaaacttttccccatgcttggactataccctgaaagaatgaatgctgaactccatgaaatcaaagtgaagcatggtatatttttgaaaataagacttttgcgaagcattactataaagtgatcagtttaggagaactgaactccagcatttttattttattatcaactggctaataatttaaatttgctgtgttatttttcttcataggtaaagaagaacccagttcaggataaaagtttgctgccaggagatgattttattcctgagccacaaatggcaattcatatttcttcaggaaatacaatgaatataacaatatccaaaagttgtcttaatgttttcaacaatttagcaaaagtatgtctgaatcttgcttagaatatttcaagtggaattttaaaatgaaacatataatttttttgtcatcaaaattagtttccaaaaaatgtgtaattatggtataggttttgggaagaatgtatgtttttcaaaaattttactgtgatgatatgttccttttcagggtttttcagagggcactgcttctacttttgactactctttaaaggacagagctccttttacggtaaaaaatgctgtaggtgttcccattaaggtgaagcccaattgtaatctcagagtaatgggcttccctgagaaaagtgatatttttgatgttgatgctggccagaatttggaactggagtatgccagcatggtaccttcaagtcaagggaacctatctatattgagccgtcaagaaagctccttcttcactctgaccattggtaggctatatttgttttccttaagggtatcttagcagttgttggtgtgggcttatttttgataaaatgtgaaaaaacattttgctgcagatatctggagatacaacatttgaaacatataattgctaacctcttgtttcttgttttctaaacttgagaaaattaaactttattgatttaagaaaactttacaaaactagattatttttgtgcccttaaataatgtatatattatataatatatataaatattatatatataatgtgtttttaaaaggataggagtttattgaggagagaaaatagctatattcagaagtcttacagtgttgacactgtgacaaagaaaaagattgttgctatatgattgagagaataagaaataagttggattttgtttttatattcaaaaccccaagcaaaactgttttcagccaaaaattttataacagtaactggtcttctttttaagtttatgtcttagaaaagcaatttgtggtgatcatttctagtgatgaggaaaaatactcttcattattttgaggtactaatgattgttatagagaaacattggcaaattaatatttggaattcttttcacttatgcactgccttagtacctcatggatatacagaagttgcaaatatccctgtggccagacctggacggcgattgtataatgtacggaatcccaatgccagtcattctgactctgtcttggtacaaattgatgcaactgaagggaataaagtaattacccttcgctctcctctacaggtaatacttcaaagttaattgtatccctttcagtgtatcaagaaatggttaaatcatttagctgaatataggaatacagtaaaacttcatcaggtcaattctgattattcagaaataaatagtaattattcagaaataaatagtaacagaaatggcttctatttactgtccagcttgctctgataatatttattttaaatgtctgtagttttgtttacttaaagctcatttttgttttctgtcttttaagacaaatgcaaaattaataaagctcttttggtatattcctttaaatattcagaaccgaggattattgtaattgtagttaggaaacattccattctctttgtatgtcacttggattatatttttcaagatatgtatgaaggcatattggaatgatctatccctctgaaaaacattttagcatcttaatctgtgtaaatattttttctacttttaaggttttatccaacatttttctttttctgtgtattactacaggtttcagcatatggtcaacaaaagaacattttttttcctacctgtaacatcagatacaaatgaaaaggtttcaaattttggacattgttatcttatagtttgttatttgctccaatgcgtaacagactgatgtcaagaaaagaattgtactatttttctcatgattttttgctatccatttctgtttagttgttatacatgatacattgagaaaagattgtcatggagaaaaaatggcttaaatcttcagagaataatacatatttgaaagataatatagactaatactaaacataagcttataatatatggagcatttgaatatctcagttttcaactgacacttaaacattaaatttaatatatatagcacttaaataccctaaaatttttcaattgccaataaaaatatcttccaatactgagtttgaaattttttagatctaaaagtatttgtttgtggctctcattttttctttcgaacttacatatcttttaaaaaacttgtatttttttttgtccaacagatcaaaaaccatttctccattgcatttatcatctataaatttgttaagaatgttaagctattggagcgcattgggatagccagacctgaagaggagttccatgttcctttagattcatataggtagatacttcttaaatgtattaaactttaaatgtattgagttggggatttatattctggaaaataacttcatatttttattaactaaagatcagtaaaagccagttttaagacataatttagtcttccattgagaaatacatttatattatcattgaatttatcaggtgaaaattcctgactgtatatttgatgtcaggatttttctgactatttttattagattgcctttgtatttgaaatgaaaatttttttaagttgtcttgtttacagagttgttttttgtttgtttgttcttttcagaaagtcctccgtaagttagctatgtgattttgggtgaatttcctaaccttttttttagccctggtttcctcatctgtatatctgtaaaaacaggaataatagcacctatcttgtagagttgtcaggaagatttaatgagatgcttttttttaagttgtggatcaaaactttattgtcactgtttcctctttctgcagatgtcaattgtttatccagccagctggaatcttagagcatcagtacaaagaatctaccacttatatttcctggaaggaagaacttcataggagcagggaagtcagatgcatgttgcagtgtccatcagtagaagtcagcttcttacctctcatagtgaatacagttgctctgcctgatgaattgagctacatatgtacacatggggaagactgggatgtagcttacattattcatctttatccttctctcactttgcggaatcttctcccatattccctaagatatttacttgaggtatgtctcttgcattttgtttgatttttgttgttgcacagagtaaattctgattttgttttatggtatttttaagtgaggtcagtgttttatatagcgtatgtgtaatgtgtaatgccttcataatgttaatgatagcaaaaactggcataacatttactatgtgccaggaactgctctgtgtgctttacatgtattagcctatttactctttataataacctcctgatgtaggtactattatcaggcccattttacacataagaaaactgagttgaaaatgggttaagtgactggctcaaggtcccatagctaggaagtggtggagctgggatttgaacctaggcagtttggctttttgatccctgcctctttactgtatcttccttaaattaagaagcatgatcgtctgtttattaattaagtaaaattccattaactaaaagataggaaaaaatgagaaaatatttcatcttaaagtttttattttaaagtcaatattatgattgtttcttcaaggttctattgaaaataaaccttggaaaataaaaaaaataattactgtctgtcttaagaagtaataaagattttctagtaatggtatatgataaatattttaaaatttctgtatggcagtatattttaaaatatgaaaatctggaaagtgtttggaacctacatgtttttttatctgacaatgagccattcctgagttgtggagacaaaaattaattaaatgaattaaatagtatttatatgagtattttataagaattaaatagtatttatgtaaggagatttttagtaaggaaacatggtttatatgttattattcatttttcaaataatgccaccttacttagataactcgtcagagtaactttttactctgactagtaaataagaataattttcttattccattcatatgggaaccattagtcatggtctataattagaggataaaactgaaggccaggcagttaagtggctcatttaatgacatagctctaatggacaacagccaggcttcctgaatctagtctttgactcttgatatagacctgattttttcacaaaactgatggctattagcctcctaatggccaaagtcagtttctgcctgtggctatggtgtagcgttttctttttagtccttggtgagtactggacatttgtaatatgtaagcatggtacttcacagaagacttagcagtttacatgcatctggtagtttatttagcatttgtgaaaaataagaattttgttatttcagagtttttaaaaagttactcagcgaatttttgtttgtttttagggaacagcagaaactcatgagctggcagaaggcagtactgctgatgttctgcattcgagaatcagtggtgaaataatggaattagtcctggtgaaataccagggcaaaaactggaatggacatttccgcatacgtgatacactaccagaattctttcctgtgtgtttttcttctgactccacagaagtgacgacagtcgacctgtcagtccacgtcaggagaattggcagccggatggtgctgtctgtctttagtccctattggttaatcaacaagactacccgggttctccagtatcgttcagaagatattcatgtgaaacatccagctgatttcagggatattattttattttctttcaagaagaagaacatttttactaaaaataaggtgtggttttgttcacataataagttaaagcagataaattcctaatctagaaacttgggagtcatttgtcttccctaaaaccatgctaacctatttgctaaatgccattggtgtgaattaggttcaaggagacttaagcgtaatcaagtgggatgttaggaactaataggtttcctgagactatgagttgcccttttctccaatgcctatagagttacctctgttcttgaagtagtagtagtagtagtagtagtatagtagatagaatagcttgaatttatgtactttaccagtgatgaaatggcatttctaaagatgtaaccattgaatttggcatatattagttgagccttcctatgtgtgaagcactcaggcaggcctttgggagagaaacctaatgcctaagcctcatcctttatgctctggtctcttctttcctcttcaggctcacattttggtatccctcaccacacatttccccaaggactcacctctaggcttttgtatatgctgcaccctttgcctacagtgcctcttcccctgttttttttctgtcttcttcatcgttcctgatatctgctgttcatcctttggcattctgctcaagcctgatatatatgaagattttctaaccatttaaaatgggcctagacatcccatccgtgtttgtacaggagtagtggttctcaaatttcagtgtacattattagaaacacctaaaggtttttttttttttttttttttttttttttttaaggcaaagttttggccaggctcggtggcttatgcctgtaaatcccagccagcactttgcgaggctgaggctggtggatcaccnnnnnnnnnnnnnnnnnnnnttttcgatgtcacatcattttgctcttctgccccaggctcgagttccagtggtgtggtcttggctcactgcaacctccgcctcccgggttcaagcgattctcctgcctcaacctcccaagtagctaggattacaggtgcctgccgccacacagtgctaatttttgtatttttagtagagatgggatttcaccatgttggccagtctggtctcgaactcctgaccttaggtgatctgccagcctcggcctctcaaaatgctgggattacaggtgtgagccaccacgcatggcacctgaagggttttaaacactgatggctgggtcctgtctgtagagtttgattcagtaggtctgggtatggtttgagaatttgcatttccaacaggtgatgctttggcaactccactctctttgagtgttgattaacacatggtattgtaattgcttgtatatgtgtctgacctctagttgtcctcaagttttttacaaactaattgggtgggtgaaggtgagattaatacaagggcacaatttgatctcttctataaaactttatctaaatcccagaaccagaagtaaactatttatcctctcacctctatagcattttttgcctcttgtatggttcttatcccattgagtcttgtatcataatttttcgtatgtatttcctaatctctctgtctagttggaagctcatcgaagacaggaactgtgtcctgctgtcttccattctgcctgtcacaatgtctttaatgtagtgtctgctgaacaatgttgaagacataaattctctttatgctaagactttaaaaatttgttagctctatgtcataagtctatcactggaaaacatcgttttgcattataattctttttaaaaacaatacataatctcattggtatctagatttactatactcattgcataggtgaatgagaaagtcagaactttctcattcaaactttctcaggaagtttttgttttgttgttccctagagttttttgtggttctgttacctgtttgcaatatggctttgattatatatttctgtgtcccacggtactaaagaaatttctagtagtccagcaactttctctcaaataaaattattatagtgttttagatttcttatatgacgatatgtgctctctggtataggtacaattaaaaatttcaaccagtgcctggtccagtagtttctcattggatacagtgggaagttatgggtgtgtgaagtgtcctgccaacaatatggagtacctggtaagattctgcttccttatttacctttgattccgttcacctttgctacagttcaacaaacaagttggaataaacatatgtgtgcatgtgtctttatagcagcatgatttatagtcctttgggtatatacccagtaatgggatggctgggtcaaatggtatttctagttctagatccctgaggaatcgccacactgacttccacaatggttgaactagtttacagtcccaccaacagtgtaaaagtgttcctatttctccacatcctctccagcacctgttgtttcctgactttttaatgatcgccattctaactggtgtgagatggtatctcattgtggttttgatttgcatttctctgatggccagtgatggtgagcattttttcatgtgtactatcgcaaggacaaaaaaccaaacaccgcatgttctcactcataggtaggaattgaacaatgagaacacatggacacaggaaggggaacatcacactctggggactgttttggggtggggggaggggggagggatagcattaggagatatacctaatgctaagtgaccagttaatgggtgcagcacaccagcatggtacatgtatacatatgtaactaacctgcacattgtgcacatgtaccctaaaacttaaagtataattaaaaaaaaaaaaacaagttggctcctaaagtgtaccgaaatttgaatttcaagtgataatgtggagggctgttatcactacaaatttttatggtcactgataccagagcaaaacctgaatttgtctaagtttaggacattgagtttaatccatccagttgagcaacttggtaaatattcacagtatgctagaatccttattctgtaccaccccttgccagacatttcttaaatcttaaatttgactagtatgaaaatttgaataatatgatgccaattaacctattttattactacttcaaaatttttattttactaatagcagataacaaagcctgtacactaattataaagcaatttatgtttggaattttaaaaagtaaagaatgctagacgtattaaatctgtcattgtaagtcgttagttaaattactaattgatatttcttgaattgtttctgatggagccaaactaaggaactataatttttttctcagaagataatcttttgcagaatgtaacttatagttgctttatttaagaattattattttaaaatattgtaagaagtttgtgtgtgaatgaggggatgtgtatatatttcaaagacattgaataaactggaaaataagcttttttcctttccacaggttggtgttagcatcaaaatgagcagtttcaacctttcacgaatagttaccctgactcccttttgtaccattgcaaacaagtcatcattagaactagaagttggcgagattgcatctgatggctcaatgccaactaataaatggaactatattgcttcttcagaggtagcatttttctttgttacaactgattcctaaaatatacaaataaatattgacatctaaataagaattgtatatacctctttttcagactatcatatttatgtgttgaaatatgacagccagctttgaaagatttttctcttactatattttttaaaaaaggagaaaagttttgataatacactagcccagtctagatcattaatagtcttttttctaattcttcctatatgtgtagaacgtagctatgtactgtaaaaagtacatagagattatgtactgtgtggtgtctccatagtcaagataatgtctctatattcaagaagctattatcttaaaagagtcataaaagtctgcatgtggagagatagcacatcctaagttataggtggttatagaatttctgaataggtgagctggaaatttctttgaaaattagctaaaattctgccctctcactttactgaaaaggaaactgagtttcagacttttccaagattgataaagtcattggtagttgaaatcatggtgttatagatcaaaagataaaagtttcacagaagaggtgggatttgaactaagctgttcatgctcagtaagattagaggaggtgaagcaaatgggggaatgtgtgccagaagaggacaggtgcaaagataagcactggtgcttgatcttgactgaattttcaaccaaaccagctgactctcaggatagttgaaggtcactttctgctgtttaaagaaagattctaaagttacttaagaaatatttggcaaaagactcaaaaggaaggattccaattacaatataaataaagttagagccctaagagctggtctgttcaaggcacttagaatgatctccataaactcagcaacaagtaagtgcttatttttttttaatctttgtgtgggtttgattatagtagtattttttattcagaaatagaatttacttagtattctataacagaagcacattttgtattaggaatgaaatcttcagttttataaataaaactgaggctcaaagaagtaagtatatggtctgatatcaaacaactaggaggatggtgtcagaacttccagcaaggtctgtggtgttctctcctctgccttcagttgtctttctggtttatctatgattaagatactctgtgaaagaattcatcatgtattaatgaattaaaatgggtatacacaaaagcaaatgataatttttaaatataatttttcaataattaaaatgaattttataattcttaatcaacaggctcctcagtttctcatattgcaattataccataaatacatatagactaatatatctgtattctcctgatgtgatttctttggtttcatggtcattatattgtcagtaatcttactatgagatgtggaggacatatttttagaaacttcataataatttaatcaagatcagaatcagaattgaaaatttaattaggtaatgtcttatttattatataacggtattgtcttaagactgataataacttctatatttttagtgccttccattttggccagaaaatttgtcaggcaaactttgtgtgagagtggtgggctgtgaaggatcttccaaaccattcttttataaccgacaggataatggcactttattgagcttagaagatctggtaagttttcatattttattttatttttatttttatttatttaattttttattatactttaagttctagggtacatgtgcagaacgtgcaggtttgttacatatgtatacatgtgccatgttggtgtgctgcacccattaacttgttatttacattaggtatatctcttaatgctattcctcccccctccccccaccccacaacaggccccagtgtgtgatgttccccttcctgtgtccaagtgttctcattgttcaattcccacctatgagtgagaacatgcagtgtttggttttttgtccttgccatagtttgctgagaatgatggtttccagcggcgctattcacaatagcaaagacttggaaccaactcaaatgtgcaacaatgatagactggattaagaaaatgtggcacatatacaccatggaatactatgcagccataaaaaatgatgagttcatgtcctttgtagggacatagatgaagttttcatattttaaaataaaatgtctttgatttttaaaatttgctttgagatatttcagtaaaccatgctatcaaaatttactggtaattatttgaaggtgctgctatatcaatatataatgccaacatatatttataacagatcagagccagtttgctttttagtaagaacttaaggaaacaggccgggtgcagaggctcacgcctgtaatcccagcactttgggaggccgaggcgggctgatcactaggtcaggagttcgagaccagcctggccaatatggtgaaaccccatctctattaaaaagtacaaaaattagctgggcatggtggcacatgcctgtaatcccagctattcggaaggctggggcaggagaattggttgaacctgggagatggaggttgcagtaacccgagatggcgccactgtactccagcctgggtgacagcaagactctgtctcgaaaaaaaccaaagcttttgtgttttacgtaatattgaaattccatatgtaagtgtagattaaaccagtacatcaaacatactttttttttttctacaatagaatgggggtatcttggtggatgtaaacactgccgaacattcaactgtcataactttttctgattaccatgagggatctgcacctgccttgataatgaaccatacaccatgggacatcctcacatacaaacagaggtatgagaaaaaagggttaatgggaaatacttttattggttcatagtaactaatgggaaacactttggtttcatattcaaaatgtttttagattttagaaaggtgatatggaacacatggtatttatctttaatacccttacatgttttgagataacactctgtaaacacattaatatttctgcagcaaaactgatgaatattcacatcaaatgggataaatagaaattattaatagtttcgtatcaattcaggtcaggttttgccgccaaatgagttttgataccaaatttccagaaaaatctttgggcttttagagctttttaaatttcaaaatggcagataagggagtgaacctgtttaagtattccctttcctggtaatctggtaacgctcagtgaacctcttcctataaatctgtatttagtttttttgggtagggatagtagaaggttaaatgagaagacgatgagtagatagtggtgttgaatgtatatcattggctgataggaatttcattgttcttgcctttgctgtcatttgttttggatgatgtcattatttaatggtagagaatttaagcccttaaagtatcgtataattttatttataaaattatatttatattaacatatgtatatatgtgtatatattcatgcatatatacacacatataaatgtatgtatatatgtaaatttgttaaagatttccctagtcttaattctaatggagtgaatccagtgagagacttaaaagtacagattaggattaaaacctagttggattactttttttctcccagttctctggaatattttttgcattaaatggacaaatacttcttaaattgtaataatcaattttaaaatctcctgggagtcttgttaagatgcagattttgactcagtaggttttggatgggacccaggactttgccttttcctgcaagaccccaggtaatacttattctgcctgtttacggaccacactttgtgtagtaacagtgtgaacataatttttttgttgctgtgacccataatatatcttaagtattgtatttgttaaaaagcttagctggtcacagtaatgcatacctatagtcacagctacttgagaggcttgggtaggagcatctcatgagcccaggagtttgaggctgtagtgcaatatgatcttgcctgtgaatgaacactgcattccagcctgggaaacagggagaccctgtctttaaaaaatatgtttaaatttaagcactgaatagaagttcttctgctactaaacatatttcctcttcacagccatttccacaggtggaccctgatctggcaatctgtttacctaatgaattccattgctatgattccacttggatcaattccgagtgcattgaagcttcagaaagggcaatattctgtttccccgagcttaaaaaccatgagtttattagatattttagggtacttgtttttaggtagagttgtgttttattaaccacagcaatttcgtaggacttctgtgctaatcccttcctcagtaaactacaggtttgggtttcttatctccaagatattctgattttctctctgttcattgtgttttagtgggtcaccagaagaaatggtcttgctgccaagacaggctcgactttttgcctgggcagatcctactggtaccagaaaacttacatggacatatgcagcaaatgttggggaacatgatctgttaaaggtatcttttgatgtgaatgagtgctatatgagttacctgacagtgaaggaagtagagaagctatcttcactgactccttgtcctaattgaactaaaagtgaattggaagtatttccagaataagtagcttttggactttagatggcaaatactgtagttcaaaccagtatattaccttagctctatcaaagtaatttatttacaatttaaaaaatagacctgctttatcttgcctatgtaaagcacctttttaattaatttacctattttaaaaggaaggaattgtaagactaagttaaaaacaactttattttgaacatacctatgccacttttggctatgagtttttaaagcttgttttcctaagcacagctatgtattttgttaattaatgaagtctgatagtatgcaaattatcgcatgtaagaaatttagtgaaatatttatcgaaacaatatttaggtagctgagttgattaaatatgttattttttagactcttagcctctgaaagggcccaaagaattcatataccatcctcccatctgatataggaattgctcctgcattagtaatatatcatccagtttctgtatgaataaaatccatgatgaaagagtttaaatagtgtcattgtccattgttcacttgtccaataatgccagctgttaaaaggctttcttgacttttgctttaaaatggtaattggccagtagttactgaattatcctcatttcttctctcctcacatttgatactacttagcaactgtagctcccagtaagtagcatgtagatactagagagaaggtagcaatgacattctggaggaggatatcaaggtctgtgtatagaaggagatccgggaagaattctgttcacagcatggtcagggatttcggtttttaatgtttctcttctatttggtgttagagaatgaggcagtaggaagagagggtgattccacctcagtcagcagatagtctgccacgtattgaaaattgagctataagcaaggaaatcgtttatgtccttgtccactcagttgatcaaagaagggagttctgcttaggcccaagtggacatgacaggggagttcaaagaaaatcatacattgttggcaaacactaggtttacacagatctttcctcatttaagtatgataaacagaaaaaaccccaacatgggctttatgaaaaaaatacttcattagaaaaaggtagcattatcctgttgattcagaaggtagttatacctctgaaaatttttttactacaggaccagaagaagcatttcgaaatgtatgcctggcatcctcaactaagttataaagacatgacaactatgaaataagagaaagcaaggtgaaataaaagataaagacagcaaaatgaagtgtaagaggagaggggaaactgtattctgtgcatactatatatttatatcccatttaatcctaaattttattagagaaatgacaaagattatatctttttaaaaaagctatcaattagtagaactcaaatcagtgagaaaggaatttcaaaacaatgagaaaatgaaaataagtaaaactttgctgttatagtaaaagaaagaaacctaagaaagtatataataaatgacagatacattttattgaggacatatcatatattaatgctttttatatattatcactaattcttacgataggaattttgaactgctagttggaattcaaaatcagatctgtctgacttcaaagtctgtgaactttttctgctagaccatgcttcccatcagttatgtcagtaaatgaaaatggtttaaattctattaaaagataaaaacattcagattaaattaaaacataagatttaactgtaagttttttacaagacttctgtttcagccaagctaacagaaaattataaccatgaagatagatggtaaagatttaacaagcaaatggaagcaaaaagaaagtaaagatgttgattttaatttctttccttttaaaaattcatacataatagttgtacattttgggggatacctgtgatattttgatacatacataaaatgtgcaataatcaagttggagtaattggcgtatcacctgaaacatttctctttatgttgggaacatttcaaatcttctcttctagcaattttgagctacagaatacattattgttaactatagtaaccctactgtactagctaacacaacaagatgttactccttctgactatatttttgtacccattaaccaacttctcttgttccctccaatccccttctcatcctttggtaaccaacatcaactctctataaagtaaaatacactttttttttttagctcccacatatgagtgagaacatgtgctatttgtctttctgtacctgactgacttcacttaacataatgacctccagtcctatccatattgctgcaaatgacaggatttcagtcatttttattactgaataatattacattctgtatatatagcacattttctttatccattcatctattgatggacatttaggttggttccatatcttagctattgtgaatagtgttgcaataaatatgggaccttcaatattctgatttcctttcattgggatatataccaagcagcggaattgcggattatagttctgtttttagttttttgaggaaactccatactgttttccatgtagctctactactttacattcccatcaacactgtgcaagtgtttccctttctccacttccatgccagcatctctgtctttttttttttttttaattaaagcctctaactggggtgagataatctcattgtggttttgacttgtatttccctggtgtttagtgatgttgaacattgctttatatacatgtttgccattgtatgtcttcttttgagatatgcctcttcagatcttttgcccgtttttaaatcacattttttttttttaaggaattcaaaacactccaccaagcttgtggagtgttttgagttccttatattttctggttattaatctcttattagacagatagtttgcaaataatttctctctttcggtttgttgtctctactttgttgattatttcctttgccgtgaagccttttagcttaatgtaatcctatatgtttgttttcacttgtgttgattgtgcttttgaggtgttatccaaagtctttgcctagaccaatgtcctaaagcatttccccaatgttttctttaaatagttctaaggtatcaggtcctagatttaagtctttaatctatttcggtttcatttttgcatatggcaagaggtaggggtctagtttaattctcctgcatcatatggttatccagttttcccagcaccatttgttgaagacactgtctttttccagtatattctcttgccgcctttgttgaagatgagttggctgtaaatgcatggatttatttccgggttctctattttgttccattggtctgtttttatgctactgccacgatgttttggttactataactttggtatgttttgaagtcagtcagtgtgatgtgttcagctttattctttttgctcaggattactttggctattcaggttccatatgaattttaggttttctctgtttatgtgaataatatcattggtattttgatagggattgcattggtcttgtagatcgctttgggtagtagagacattttaacaatattaaattcttataaaccatgaataagggatatcgttctattttttggtgtcctatttcatttttttcattagtgtttcatagctttatacattttggtcaaatctttttcctaggtattttatatattttttgtagcttttgtaaatggtattgctttcttgatttcttttttagtttgtttgttgttggcataaagctatgcagttgatttttttttttggagacagggtctcgctctgtcacctgggctggagtgcagtggtgtgatcatggttcactccagcctcaacctcccaggctcaagtaattctcccttcagtctctcgaatatcagggactacagttgtgtaccaccaagcccagcgtttttgtttttgtttttgttttttttctgtagagacggagtttcgccatgttgcccaggctggtctcaaattcctgaggtcaagcgattcacctgccttggcctctgaaagtgctaggattgcaggcatgagccactgtgcccagccatttgattttaatatattgattttgcgtcctgcaactttaccaaatttatccgttttaacaggttttttctttttttttaatgtgtgtggagtctttaggtttttctaaatgtaatatgttgtttgtgaacgaggataatttgactttttttttttttcaaatttggatgccctttttttctttcgcttgcctgagggctttgactaggacttcactatgtgaaataaaaatggtgaaagtgggcatctttgtcttgttctagatcttagaggaaaggctttcaaattttccttcttcggtatgatgttagctgtgggtttgttatatatagcctttatcattttgagatacgttccttctgtgcctagtttgttgagaacttttttcataaagcaatatcaaattttgtcaaacgcttttttagcatctgttgaaatgatcacatggtttttgtccttgattctattaatgtcatgtgtcatgttaatttgcttatgttgaaccatccttgcatccctaggatgaatctcatttgaccctagtgatggatctttttaatgtgttactgcattcagtttgctggtattttgttgaggattgtagttgttgttgtatctttgtctggttttagtaataggttaatgctggcctttgtaaaatgagtttagaagtattccccgctctgcagtttttttttgaagagttggagtagaatggttattagttcattttttttttaaacacttttaatttttttttttaagttttttttcttttattattatactttaagttttagggtacatgtgcacattgtgcaggttagttacatatgtatacatgtgccatgctggtgcgctgcacccactaacttgtcatctagcattaggtatatctcccaatgctatccctccccctccccccaccccacaacagtccccagagtgtgatgttccccttcctgtgtccatgtgatcgcattgttcagttcccacctatgagtgagaatatgctgtgtttggtttttagtccttgtgatagtttgctgagaatgatgatttccagtttcatccatgtccctacaaaggacatgaactcatcattttttatggctgcatagtatttcatggtgtatatgtgccacattttcttaatccagtctatcattgttggacatttgggttggttccgagtctttgctattgtgaataattccgcaataaacatatgtgtgcatgtgtctttatagcagcatgatttatagtcctttgggtatatacccagtaatgggatggctgggtcaaatggtatttctagttctagatccctgaggaatcgccacactgacttccacaatggttgaactagtttacagtcccaccaacagtgtaaaagtgttcccatttctccacatcctctccagcacctgttgtttcctgactttttaatgattgccattctaactggtgtgagatggtatctcattggggttttgtcttggatttctctgatggccagtgatgatgagcattttttcatgtgttttttggctgcataaatgtcttcttttgagaagtgtctgttcatgtcctttgcccactttttgatggggttgtttgttttttttcttgtaaatttgtttgagttcattgtagattctggatattagccctttgtcagatgagtaggttgcgaaacttttctcccattttgtaggttgcctgttcactctgatggtagtttcttttgctgtgcagaagctctttagtttaactagatcccatttgtcaattttgtcttttgttgccattgcttttggtgttttggacatgaagtcctcgcccatgcctatgtcctgaatggtaatgcctaggttttcttctagggtttttatggttttaggtctaacgtttaagtctttaatccatcttgaattgatttttgtataaggtgtaaggaagggatccagtttcagctttctacatatggctagccaattttcccagcaccatttattaaatagggaatcctttccccattgcttgtttttgtcaggtttgtcaaagatcagatagttgtagaaatgcggcgttatttctgagggctccgttctgttccattgatctatatctctgttttggtaccagtaccatgctgttttggttactgtagccttgtagtatagtttgaagtcaggcagtgtgatgcctccagctttgttcttttggcttaggattgacttggcaatgcgggctcttttttggttccatatgaactttaaagtagttttttccaattctgtgaagaaaggcattggtagcttgatggggatggcattgaatctgtaaattaccttgggcagtatggccattttcacgatattgattcttcctacccatgagcatggaatgttcttccatttgtttgtatcctcttttatttccttgagcagtggtttgtagttctccttgaagaggtccttcacatcccttgtaagttggattcctaggtattttattctctttgaatcagttgtgaatgggagttcactcatgatttggctctctgtctgttgttggtgtataagaatacttgtgatttttgtacattgattttgtatcctgagactttgctgaagttgcttatcagcttaaggagattttgggctgagacggtggggttttctaaatatacaatcatgtcgtctgcaaacagggacaatttgacttcctcttttcctaattgaataccctttagttccttctcctgcctgattgccctggcaagaacttccaacactatgttgaataggagtggtgagagagggcatccctgtcttgtgccagttttcaaagggaatgcttccagtttttgcccattcagtatgatattggctgtgggtttgtcatagatagcttttattattttgaaatacgtcccatcaatacctaatttattgagagtttttagcatgaagggttgttgaattttgtcaaaggccttttctgcatctattgagacaatcatgtggtttttgtctttggctctgtttatatgctggattacatttattgatttgtgtatatttaaccagccttgcatcccagggatgaagcccacttgatcatggtggataagctttttgatgtgctgctggattcgttttgccagtattttattgaggatttttgcatcgatgttcatcaaggatattggtctaaaatcctcttttttggttgtgtctctgcccagctttggtatcagaatgatgctggtctcataaaataagttagggaggattccctctttttctattgattggaatagtttcagaaggaatggtaccagttcgtccttgtacctctggtagaattcggctgtgaatccatctggtcctggactctttttggttggtaagctattgattattgccacaatttcagctcctgttattggtctattcagagattcaacttcttcctggtttagtcttgggagagtgtatgtgtcgaggaatttatccatttcttctagattttctagtttatttgcatagaggtgtttatagtatagtttatttgcgtagaggtagtttgtatttgtgtgggatcggtggtgatatcccctttatcattttttattgcgtctatttgattcttctctctttttttctttattagtcttgctagcagtctatcaattttgttgatcctttcaaaaaaccagctcctggattcattaattttttgaagggttttttgtgtctctatttccttcagttctgctctgattttagttatttcttgccttctgctagcttttgaatgtgtttgctcttgcttttctagttcttttaattgtgatgttagggtgtcaattttggatctttcctgctttctcttgtgggcatttagtgctataaatttccctctacacactgctttgaatgcgtcccagagattctggtatgttgtgtctttgttctcgttggtttcaaagaacatctttatttctgccttcatttcgttatgtacccagtagtcattcaggagcaggttgttcagtttccatgtagttgagcggttttgagtgagattcttaatactgagttctagtttgattgcactgtgatctgagagatagtttgctataatttctgttcttttacatttgctgaggagagctttacttccaagtatgtggtcaattttggaataggtgtggtgtggtgctgaaaaaaatgtatattctgttgatttggggtggagagttctgtagatgtctattaggtccgcttggtgcagagctgagttcaattcctgggtatccttgttgactttctgtctcgttgatctgtctaatgttgacagtggggtgttaaagtctcccattattaatgtgtgggagtctaagtctctttgtaggtcactcaggacttgctttatgaatctgggtgctcctgtgttgggtgcatatatatttaggaaagttagctcttcttgttgaattgatccctttgccattatgtaatggccttctttgtctcttttgatctttgttggtttaaagtctgttttatcagagactaggattgcaacccctgcctttttttgttttccatttgcttggtagattttcctccatccttttattttgagcctatgtgtgtctctgcacgtgagatgggtttcctgaatacagcacactgatgggtcttgactctttatccaatttgccagtctgtgtcttttaattggaacatttagtccatttacatttaaagttaatattgttatatgtgaatttgatcctgtcattatgatgttagctggtgattttgctcgttagttgatgcagtttcttcctagtctcgatggtctttacattttggcatgattttgcagcggctggtaccggttcttcctttccatgtttagcgcttccttcaggagctcttatagggcatgtctggtggtgacaaaatctctcagcatttgcttgtctgtaaagtattttatttctcgttcacttatgaagcttagtttggctggatatgaaattctgggttgaaaattcttttcttcaagaatgttgaatattggcccccactctcttctggcttgtatggtttctgccgagcgatccgctgttagtctgatgggcttccctttgtgggtaacccgacctttctctctggctgcccttaacattttttccttcattgcaactttggtgaatctgacaattatgtgtcttggagttgctcttctcgaggagtatctttgtggtgttttctgtatttcctgtatctgaacgttggcctgtcttactagattggggaagttctcctggataatatcctgcagagtgttttccaacttggttccattctccccatcactttcaggtacaccaatcagacgtagatttagtcttttcacatagtcccatatttcttggaggctttgctcatttctttttactcttttttctctaaacttcctttctcgcttcatatcattcatttcatcttccatcgctgataccctttcttccagttgatcgcatcggctcctgaggcttctgcattcttcacgtagttctcgagccttggttttcagctccatcagttcctttaatcacttctctgtattggttattctagttatacattcttctaaatttttttcaaagttttcaacttgtttgcctttgattttaatgtccttccgtagctcagagtaatttgatcgtctgaagccttcttctcttagctcatcaaagtcattctccatccagctttgttccattgctggtgaggaactgcattcctttggaggaggagaggtgctccgctctttagagtttccagtttttctgttctgttttttccccatctttgtggttttatctacttttggtctttgatgatggtgatgtacagatgggtttttggtgtggatgtcctttctgtttgttagttttccttctaacagacaggaccctcagctgcaggtctgttggagtaccctgccgtgtgaggtgtcactgtgcccctgttggggggtgcctcccagttaggctgctcgggggtcaggggtcaggcacccacttgaggaggcagtctgccccttctcagatctccagctgcatactgggagaaccactgctctcttcaaagctgtcagacagggacatttaagtctgcagaggttactgctgtctttttgtttgtctgtgccctgcccccagaggtggagcctacagaggcaggcaggcctccttgagctgtggtgggctacacccagttcgagcttcccagctgctttgtttacctaagcaagcctgggcaatggcgggcacccctcccccagcctcgctgccgccttgcagtttgatctcagactgctgtgctagcaatcagcgagactccgtgggcgtaggaccctccgagccaggtgcgggatataatctcgtggtgcgccgttttttaagcccgtcggaaaagcgcagtattcaggtgggagtgacccgattttccaggtcccgtccgtcacccctttctttgagtaggaaagggaactccctgaccccttgcgcttcccgagtgaggcaatgcctcaccctgcttcggctcgcgcaccatgcgtgcacccactgacctgcgcccactgtctggcactccctagtgagatgaacctggtacctcagatggaaatgcagaaatcacccgtcttctgtgtcgctcacgctgtgagctgtagaccggagctgttcctattcggccatcttggctcctcccccttattagtttattttttaagtgtttggtagaattcagcagtgaagccatcaggtccttggcttttctttgagggaagactttttattattgctttgatcttgttgcttgttactggtctgctcaggctttatgtttcttttaaaataatgtttaaaaattgacacaattgtacgtacttatgatattgtgctatatctgtaatatatactgattagatcagggtagttaacatattcatatctcaaatatttatcatttctttgtgttaggaacattcaatatcctttttctagctatatgaaactatataataatattgttaactgtagtcatcctataatgctataggacactagaactgattcctcctatcttgctgtaattttgtatctcctttaagaaatctttccctatccgcccttcttcctatccttcccagcctctagtatctgctgttctaatttttacttttatgagaccaactgttttttagctaccacatatgagtgagaatgtgcagtatttaactttctgttcctggcttatttcacttaacatgatgtcttccaattaggttttctgtttcttccagggttcgttattagcagactgtttgtgtccagaaatttatctctgtcttctgtgttttccagttttttggcagatagttgttcataatagtctctaatgatccttttgtatttccttggtatcaactgttataagtctccttattcatgtctgattttattgatttgaggtcttctctttttttgtagtctagctaaaagtttgtccattttatcttttcaaaaaactttttgtttcattgatcttttgtatttttttgtctcaattttatttatttctgctctgatctttattattttttccttctactaattttggttttggtttattcttgcttttctagattcttaaggtatactgttaggttgtttatttgaaatctttctacttttttgatataggcatttattgctgtaaaattccctcttagtgctgcttttgctgtatcctgtagattttgatatattgtgtttccattttcatttgttttaagaaaattttttatttccttcttaatttcttcattgacttattgttcaggaacatatttaatttctgtgtttttatactttacaaattcctgttgttattgctttctagttttattccattgtggacagaaaagatacttgatataattttaacttttttgaattttttgagacttgttttgtggcctaccatatgggccatgtgcagatgagaagaacgtgtattctgcagcagtcggatgaaatgttctgtacatgtttgttaggtccatttggtctaaagtgtagtttaactccagtgtttctttcttgattttctgtctggatgatctctctattactgagagtgggggtgttgaggtcccctattaatattgtattccagtctatctcttcctttagatctgttattattttctttatatatttggctgctctggtgttgggtacatatatttacaactgttatatcctctttctgaattgacctctttatcattatatagtgactttgtctctttttgtaatcttagccttgaaatctattttatttgatgtaactaagcatagctactcctactcttttttttttcttggtttccatttgtgtggaatatcttcttctatcccttcacgttcaccctatgtatgcctttgtagttgaagtgtgtttctggtagacaacatatagttgggccatattttttaatttacccagccactccatttctattaattgaagaatttagtctatttacattcattattattattgataagtaaggacttactactgccattttgttacaggatttctggggttttttttttttctgctttttgttttgagacggagtcttgctctgtcaccctggctggagtgcagtggtgcaatctcgtctcactgcaacctccacctccttggttcaagcaattcccctgcctcagcctccctagtagctgggattacaggcatacgccaccacgcctagctaatttttttgtatttttagtagagatggggtttcaccatgttggccagactggtctcaaactcttgacctcagacaatccgcccacctcggcctcccaaagtgctaggattacaggcatgagccactgtgcctggcctttctgattcttttataatgcccctctttctttcttcttttcttactgacttccttagtggttaagtggtttttctctgacagtatgtttttagttcattgctttgcatttttagtatatttattattggattttgctttgtggttactatgaggcttacaaaaaacatcttatagacacaatacattattttaaacaaatgacaacttaactttgatcagaaaggaaagcaaggaaaccaaaaaggaaaaactaaaaaatgctacacttttaagtccatcccccatacatcttggcattctgttgtctcaatttatatcttttttgtattgcctattaagaggttgttgtaattattattatttttgatagatttgtcttttagtcttcatactagatatatgagtggattatacaccacaattatggtgttagattattctcaatttgtctgtgtacttagttttaccagtgagttatatgcctccaaatttttttttcattttaacattgttttctttcatatcaagtaactccttttatcattttttgtaagatgtgtctagaggtaatgaattccttcagcttctgttcatctgataaaaactttatctctctgtcatgtttgaaacaaagctttgttggatacaatattcttggttggcagggtttttcttccccttcaacactttgagtatgttgtcccactgcctcctgcagggcatggtttcctgagaagtcagttgccagacaaattgcagcttctttatatgttatctgcttcttttcttttgccacttttagggtcctctctttgtcataggcccttgagagtttgattattatatgccttagggtagtcttctttggattgaatccgtttggtcatctgtgacctttacctgtgtatttctatctttctccaatagggaaagtattttcttgttaattctttaattaactttctaccccttgctctttctcaactctctcttgaccaccagtgactcttagatttgctcttttgaggttattctctatattttgcaggcattctttgttcttttttattctgttttctcctctgtgtattttccaatagcctgtcttagagctaactgattccatcctctacttgatccagtctgctgttgagagcctctaatacatttttcagttcagcaaatttatttcatcattccagcatttctgtttaattttattatttcagtctgtttcaatttcactgataaatttcttaattgtttttctgtgttgccttggaagttgctgactttcctagaattgctcctttgaattcttgatctgagaactcacacgtggctgtcttatcagagtttgtcactggcactttgctttgtctgtttggggaggccatggttccctgcttgctgttgtttcttgtggacatgcgtctatggctttacattgaaggattatttatttattccagtgtttgttctctggcttgttttggtctttctagaatatgtttgcttagaggtcctttgcagttgcctttgggtcccctttatcctagatcactgcctcctattcagcactagatggtggtataattgctggtttgcctcagttctctgaaacatttggcagtactgtctccagtggtggggaaggggttgcatctcaaaggggatatcccagctatgtaggaaggctgcccagggttcctcctcagaagacttagggactgtgcctcccacagtgttgtgctgctgaacagccactctgaataggcgtttcctttggctgaaataaagagcagaaattcttgggctggagtttttaatcctgcttctcctctttgtctgtagcctcccttgggggttttctcttcctaaagcacttgtgatgcttcccatgggctgagccaggagtggttttcctgcaagggagcccaagatggtgaggaagctggctttctgctttgatctcactttatccagtgtagaaattgtgagcttaagaggaatttcctgcatgcagtgccaggcagattcggggagaggcattgtgggtagagaagttcatttctgttaccatctgcgtggagcttttcacttctctgtggctccaggaattgtgtcagcctcaggttcaagttctgggatattgctgatgataatcttggcactagaagtttatgtttggttttctgtggtaaagagtgaagccacattgcttctactcttccattttggcgttatcaccctctgttgattttaatttctgaccaattcaaagcaaaattattaaatagataatgataatatgacacagaaggagtgatagccataaaccttcatgcaatgaatagtattgcatcaacatataaaacttaaaatgctagaaattaactgaaacacaattacctggggatattttattgtacttcacatgaaatagatgaaaaacaagagtcagataatattggaataataactgtgaactaagatacatagcacattttgtagtttacagatacagaattcaccttcttaataggtatgtttgaaaatttgatttcttattagagtaaaaaaattgggcaggcatctttgatcacataatgtaccttgaaagtattagtaaattttgaacattagtgacactcaactattcttatactcttggtaacttcagttgtttttgtttttttttctcccctggaaagcatggaatggaaagtacatagtaggtactcgtactgcttattgaaatgaactgttctattttcattaaacccagaacaaagtggaatttattattttaacctctgaaaacactgaccaaatcaagcctcatatttttaagtgctacatataaccttcaccagtgtgatttacataaatatttcctatgttatagatcatgaaaatataaaaataagctaggctggttttgtctgaggttacatttctttctttcttttttgagatggagtgttgctcttgttgcctaggctggagtgcgatgacgctatctcagctcactgtaacctctgtctcctgggttcaagcaattctcgtgcctcagcctcctgagtagctgggattacaggtgcccgccaccatgcctggctaatttttgtatttttagtggagacggggtttcaccatgttggccaggctggtctcgaactcctgacctcagatgatttgcccgcttcagcctccaaaagtgctgggattataggcgtgagccaccactctgggctaaggttacatctctaataaacttccgaaccattctgttttccggcttggagacaaagaatcatcttattgcattggtgccaccaaaggatcctcttgaatcctgctctgtgcccttcagcactcagtaggtaattcagacttaggtattaaaaaactacgtactattagtcttcgtttttgaaaataattggtgagtatattttaaaatagattatagcttaatttatgtcattttgatggttagaatttttcaatttatagtagtgcttcttaaacttttctaatctttctgttattatagttcaattttatataataacaagttactatgtgtgggtttaatgaagtctttcttcttcccaggatggatgtggacagtttccatatgatgcaaacatccagatacactgggtatcatttctggatgggcgccagagagttttgcttttcaccgatgatgttgccttggtttccaaagcactgcaggcagaagaaatggaacaggctgattatgaaataaccttgtctctccacagtcttgggctttcactggttaacaatgaaagcaagcaggaagtttcctatattgggataaccaggtatgcaagaaggaaaataagacatcctaaacctttaaaaggcattaagttcataatagccgatttgaagaaagtaaaaagatacctggtttgactttggtatgctgtatatttattcagtaaagcttactgaataattctttgaactgttagttgaaaagccccgaggatagaaagatgactaagatattgtctttgtcttcacaatactcattgtcagttggtgggggaaaaagtggtttgtttctttccttgttgtccttaatgtgtgcgtgtgtgtgtgtgtgtgtgtttaatgagttacaaaaatactgagaaaaggaaaggatgtacaaagaaggatgtacatgcacagtggaagtacagaggtacaagtgactagtttgttttgtgcagtagaggttagagaaactgtcatgagttagggggaaaccaacagaaacaaattggaaaaaaggttcagagaggaggctgtatttgatatgagtacataatctttaatgggtggccatttagaattttctaatagttatgggaccagttattttctccagttctatttatacctgtataagaaaaatattagagtatgtagttgattttaaaaatcacacttaatttggtaaaagacttattcttttttagaggctgatgggtggaatggttgacatgatacaaaatataaccaggataggatctatcaagaagcacacgtttggggaaagaaaagcaaattaaggagaaaagtaaatagatagtctatgtaatgaactttgcacaacacctgagaaactaatggttataaatggtatcatacataccattaatataatgttaatatatttatatgtagataggcaatgcattctttgttatatatttgagtattatatgatatttttaaactaaacatggaaatcatttttagttatataggtccagttttcccttttgttcttctataaaactttttactttaatattgtatatgctgtcctggtttgtcaggtttacctttatttataagaacattaaaaaatttatctaaaataacttcattaccttttttatgacatggtacacattcagtgaaatctagattttcaaaggaaaaacaccagttacataattttaaaaatcactttttttgagcagccttatgtctagagaaaaactgtaaaataaagagttttcacgtacccgcactcttgtttcccctattactaacatcttgcagtagtgtggtacatttgttactattgatgagctaatattgatactacattattgtctaactccattattatctaacttctatatctaacattaagtattattctttgtgttgtacattctatgagttctgacaaatgtgtaataacctgtattcaccattacagtattatataagatagtttcactgccctaaaagtctctcagcttcctcctgttaatccctccattcctcttctaaacctttggaaaccgctgttctttttattgtctccaaagtttttcttttttcagaatttcatatagttggaatcaagcagtatgtaacctattcaaattaacttctttcacttagcaatatgcttttaaggttcctttgtttcttttcatggcttgacagctcatttctttgtattattgaataatagtccattgtatgaatggactattactccagtttgtttatccattcaactattgaaggagatcttggttgcttccacattttcgcaatgacaaataaagctgttataaacattcgtgtgcaagtttttgtgtagacatatgtttcctctgctttggggtaagtgccaaggaatatgattgctggatcatatgataaaagtatgtttagttttgtaagaaacatcaaattatcttacaaagtggttgcatcatttttgcattcccactagcaataaatgggagttcctgttgctccacatccttgccaaaatttggtattgtcggtgttttggattttagctattttaataaggatatagtagtgtgtcattgttttactttgcggttttctgatgatacatgatgttgaggatctgttcatatgcttatttgccatctgtatgtcttctttcctgagccacctgttcaaatcttttgtccattttaaaattaggttattttcttaacgttgagttttaagagttctttgtttattttggataccagtcttttatcagatgtgtgttttgcaaatactttttcccagtctgtggcttatctttttattctctcaactgcttttaacagcagaagttttatattttacctcagacttatcaattctcttccttcatggattgtacttttggtgttgtatataagaagtctccactataccgaaagttagctttatttcctcctattatcttctaggagttttgtaattttgtgttttatatttatttatttttatatatgtatgtatgtatttatttttgagacagagtgtcactctgttgcccaggctggagtgcagtggtgtaatcaccgctcactgcaacctctgccaactatgctcaagcaatcctcccacctcagcctcctgagtatctgggactacaggcacgtgccaccatgccaggctgatattttttatttctttgtggagatgggaattcaccatgttgtctaggctgatctcaaacttatatttaagtctaatccagtttattttttgtgaaagatggaagctctgtgtctagatttgctttattgcatatggatgtccaggtgttccaacataatttgttgaaagactttggtagtttcctcacttagatcacatacacattgtattcgattttatttatacctaagtgtttgtttctttggtgctaatgtaaatggtattctgtttttattttaaatttcaattgtttattgctggcatgtaagaaagcagttgacttgtatattaaccttatatttttgcaatcttgttataattgcttattagttacaaggattttttggttgattctttgggattttctgtttagacagtcatgtcaaatgtgaacattgacactttatttcttcactcccagctttattttcttgtcttatcacatcttggacttccagtactatgttgaggtgggaatggttgagagtggaaatacttgccttgttcctaatcctggtgggaaagcatctggtttctcactatgatgttagctgtaagttttttgtaggtgctctttatcaagttgaggaagttctcctttaagttgtctcagagtttttatcataaataatgttggatttatattgtctgtagtagatattttattcagtgccttcattgactggtatcctctaaatacattttatagttaggacattgttaacactatcattgactaatagaaacaagctatgtgaaataaaatattatagattttagtattctctaattcaggtgccagcaaagtttggcctatgagccaaatctaacccaatgcctgtttttgtacaaactgtatgaaattcagtttgtttcccataaataatgttttgttgggacacagtgatttctgttcttttacatggcttctttgacattgctactcagtgcactacaaatcacagcatgtttgagttagtgcatattgttctgcagcattttttactttactgatatatatccgtcatatcaaaacaagagaaaagtgaactttgaatgttcatcttttagggcataatgaaatgtgtatgatcttcttattaaaaaaagcatcattttattatgttatggaactacagctctgctgaagtaatgcaatatatgttgacagtatagtttccaaactaagcacttaccgtaacattttcaaatcacaggaaagcaatggccagaaaaattagaaaatttaaggcaaaatatgtcatcacacggaatatcttaacaaatacaaaaaacaataatgaggctgtaagcaaagtaagtttctgagtgacttacttgttagctaagccaggaaagtcttttaccaatagtgagttaattgaattgtgtctgattgcagcagctaaagaaatgtatccagagaaaatgaactcgtttaaggccattagcctttcagtaggaacagttgcttaaagaattgaagacattcagaacaacctcaatagtcaattacaaaaacaaggcaaatgatattgagtggtttcctttggctcttgatgagtcaacagatgttaccaatactgctcagttatatatttgagaagtcagcacggagtctgaagtgactaaaggattaacctgtataaatagtttgcctaggacaactacaggtgagaatattttcaaaccagcgaaagaaatactaattcagtacaacctgaagatagatacaactgattatgggaaaaatatgtgtggaacagaaaaagacttagttggacaaattcataaagctagtgaaaatgtaaagcatttaaagcctattgtattatttgtgagcaggtacttagtggaaaatatttcagtccaccttttgttaccaaaccattagtgtcaaatagttaacttcattaattcatgtggacttaactatcatcagttctgtgaattttcacgagaagtagaagctgaatgttcttacttgtgttaccacacagcagtttgatgggttagcagcagtaactttttagtgtactctttgagttctgggccaggattaaaatttttttgaacaaaaagaaccaccctcaaccactatgactaaacaccaataatagtggctttggaaattaatttttgttgcagaattgataatgcaataatagtggctttggaaattagtttttgttgcataattgcagaattgatgatgttttttaatgaatttcaagctaaaattagaagacaaacagtgcttatgtgaaaaatttatactacagtatagtcaattttgaagacagctaatgtttgaatctcaggtagtatcaagatgttccatgtacttcctgtgctgtccaaggttaaaacatgaagcaaaatctccacttccacatgtatttggagaggatatattttaaggcctgcaactccagttccagcaacattttttctgacctcagtgcaggtgtaaggaaatttccacatttcaaaattcatttgtgcaattgaggagcttctacctaactttgaattggaagtgattgacctgtaatgtattaatatactaaaaggcaaatatcaagagaagaatttaatagaattttatgaatgccttccaagtgatatatatgctcaagtaaaataataaattctcattgaccaatatcagtatttggcagcacctatctgtatgaaatggcatttttaaagatgctcattacagattaccattaatagatgaacatttacaatagattttggtaataaataacactaagtgacatgttactttcacaaaagaagttttttttttcattaatagacttgtttttaagaattgctcttaattattttatattctaaatttcatcaattaaaatttatgggagttttttctctctttggtatctaagttgcctatctaataacttgaattttgtctcagtccagaaagcctaaaatatttactatttaatatatgaccctctgcagaaaaagtttgccagtcccttagttggttgatgtcaacgttgatagaaaaagtattttcttgcctgcctcttttctttttgtactcttgcaacacaggtatagttcgttattttaagaagtcccttataccaatgtaattttcataggaaaataatagttacaataatctggagttgaataaagttccacagacctaaatacatattgctaatttaatttttttgtgtgaattatttagttctggtgttgtttgggaggtgaaaccaaagcagaaatggaagccatttagtcaaaagcagataatcttattggaacaatcctatcagaaacatcaaatatcaagagaccatggctggattaagctagataataattttgaggtataccaaaattcttttgttttgatttttatatgtgtattttcttggtggtggtagtaagtaaaattgtaatgcccaagtaaagacatgtgcagaaatgaacttatttattggtagataaacttttatttcttaataggattggcgtgtctaatgatacacgttagtatatttttaattaaaatatattgttatttaataatatactgtgaaacaggatttaaacctgtgttttaataattttattacatttttatatttttataattttatttacaaatcagatagtcttatggaacttgtttccagaaagattagggagaagttaagaatgcctcattgaaatttttgttatattttgaatgacaccaatatatattgctaaataaagaccgtgtaaaattacatatttcattgaggaaaaacctacaaaaagctgctcaagtaaattcattaaatgtgagtgattgttggacctgagtaggcatccacaaataaagatgcactccacctaggcccttacacagttaagactaaaagtcacctgtgctccaggaagtctacagaagcttgactgcaatttccagcttgctctagtttaatcatgcagtttagttactctttgtcattgttgcctgatggtttggttagcactgtcaccagttacattccccagcacccccaccaattttggccatacttaaatgataaaaaactatataattcatgtcagacgtgactaagctctcaattattgattgcaaaacagagtttgtttagaattatctttgggccaggtgcagtggctcacacctgtaatcccagtactttaggaggctgaggcaggaggatcacttgaggtcaggagtttgagacttgcctggacaacatagtgagaccttgtctctacaaaaaaaaaaaaaaaagataataaaattaaaattagctgggcatggtgtcacatctgtagtctcagctgcttgggaggctgaggcaggagtatcacttgaggccaggaggttgaggctgcagtgagctgtgattttgccactgcacttgtgacagcaagatgccgtttcaaaaaaaaaagaaaaggaaagaaagaattatctggaactattcgttacttgaggaagttttcttttacataaagcatgtttttaaaactatagtttctatacttgaaaagtttcacgatcttttttttctaataactggtagaaaagtggtgcttttgcttcagagatctcaactgtagatcaccttaagatagatctgttggtgagacataaagataaagattttttcaatttgatcaataaacagatattaaaaatggaatagctactgtgctaatatcagctcatcacaaaaacatgtgctttttttctaggtcaattttgataaagatccaatggaaatgcgcctccctattcgtagccctattaaacgagactttttatcaggaattcagattgaatttaagcagtcttctcaccagagaagtttaagggccaggttgtactggcttcaggtaacattgtcattctcaaataagtatttatcatcactttgggaatcttgggaatgaaatttcttttttacaactatatagtttacattgtaattggtatcttttctttgtttgtatgttttttcccctttttccacatatcctgtttatttaacatcttacttataaacttcgtgactgttaagactaattttgatcgattagcctgcaaaagggttttcttgcactgagattgttattcttaaatgttcctttgaatttgtcatgggacccccaaataagattttcctttgtcgtcattcaggacagagagcagagctttgctggaggttccttttggatgcttgcttgctctctcccagcatccctcccttccttccttttagctgttaagtactgtttaggctactttaattcttcttctttttctcttatcccctaatttcatattcagtttcaacttttatttaaaccatagagaattgaaatctcacaggatccatagatacaagtattttcattaatgatgtacatactgcacactgttaatacaattatgagagtatttatatagtcctttattgaaagccttgcccttgctgaggtatgtaacttttacagatttaaaatgaaacttctaattacaccgcatatacacgcagacacttaattatgatgaaagtggtggcctcttctataacattatctttgaaactaaaagtttaaattatttgaaatcttgataagttcgttttcttttctttcaggttgataatcagttaccaggtgcaatgttccctgttgtatttcatcctgttgcccctccaaaatctattgctttagattcaggtaaaataaaataagttgtgacatagatataccttatttataaaagttaaataggcattagtttaacctagtataaagcattatttttttttatgtgttacttcttcctcttagagcccaagcctttcattgatgtgagtgtcatcacaagatttaatgagtacagtaaagtcttacagttcaagtaagtgaagattcctgctgtttctctaaaagaatttaaaatgagaatctactttgaaaataaatcttactctttttgaaagtgactttcatgtaaaaagtattttccagctgaacctattaattcacttttggtcaagtaatcttttatgcttcaacttattttagtagtagtctctacatattttaaagtgtagaatttcttcaaccatcttcttccctttataacttcaattagaatataaaatagtaagtgaaatctaaatgatatgtatttgtgagctgtgttctttaatgtaattgctgtgaactttaaaaattggatcatacatgctacatgatctggttgtatttgtttcatctgtgacatgacgaatgtggcatttgggactgtaattgctaagtgttaatgcagcagtattaccttgagtgaagctttcactccagtgaaaaagtctcaatctaagaagactttgatcttattaacataatttttaggagatgaaggaacaagatataactgtggcttttcactgaaatcaaagttttaacattgaaaattaaaagatttggtagaaatccttttccattttaaattttttttcttaggtattttatggtcctcattcaggaaatggccttaaaaattgatcaagggtttctaggagctattattgcactgtttaccccaacaacagaccctgaagctgaaagaagacgggtaaaaatttttatttcttggggaaaatataaaattaacaaaatttaaatcagcctcttttgaacgaattctaatagagaaaaaaattaaaatagaaattcttgattttatttttttcagacaaagttaatccaacaagatattgatgctctaaatgcagaattaatggagacttcaatgactgatatgtcaattcttagtttctttgaacatttccatatttctcctgtgaaggtttgttgtaattattattttgaaaatttagtgaaattattgtagaactttttaaagggtctgtggaccaaggtaggttttaatttgttgcatcatgtatttggtgggaattttgtttgattaatcgaaataattaagacagttctctgtagcatatgtgcagccacaattcccacagagaaaccaccagagcatgttctccagttttgaattaataacccccttattcaaagaagaagctgacaaaagcgtttcttaattaagcgtagaagtgcttgccaacgtttaatgttttggttgcactttgtaactactatcactgtctaaacagagagctataatgggtgctgtaaccagaatgtgaaaacgctgaagtaggtactatactgttgatgtggtgtttttccccccttccaaaatttgcttgtaactaagggagtggaaaattggatacctttcacttgcctgatgttgtactttatgaacccatttcttttttcccttttgttgttctttttagcttttataggagaaggtgactgcttagtaaattcttaaattcacaaatgctatcaaccataatgctctaaacttgtgtaatgggccagatttataattaagtaactctttaaaatattgatgatcctttacattctcaaaaactgtttacagcacattactttcaattgcatttaccagtccttcagctaaatgaatggatttctaaaatggaattattattttaaattgatctattagtttggtgatatcagacatactgatagtgtcaggtttaaaattgatattgttttatgtgataggtaatataccatttctttttcacttttaagtgaaaatcagttatttgtgggattgaacaataccttaaacaagtatttactgaatgcttattatgaaagttgctgtggaggtataaaacagcttcatggatattatattctagggggatattaatgattgataatttacctattcgtgttcttaggcacagtgggaattgtgccatgaagtctaatggcaaagattatgaacaacaattattttcatagcccataagtaacattgccctagggaagggctggattaatgtttacctgtggttacctttcctggatcccagcactcccagactcgtcatttgggcagagggtcacatgaaagaaaaaactaaccacaggctttcctggcgttgccccaagtccactttacttgaactctatattggttagttaatatgcctaggaaatgacaaaatgagaaaggaaattcatctactttatttacacatattgaattactttttgcctgtgtcttcttgcactattgcactaatgatggttcagttcaaagtagcagctaaatgagaatctgaaatctcatgtttaaatactaagttggaggatctgtggaagctgaaagccttattatacttttaaaaacttgacagcttgctaacttaccttaattgtcatgttattgttattatctgtattttgactggcagattacttgtgtgccagtttacatgtttttcttcttaaaatgattacgccatttttgtaaagtgtgtcggtttccctcatatgaatgcaatggcatttatatacattgcataaaattagaactctgtttttggatcagactaatttgtattctatcaaaaagcaaagagaatcaaatgtaagtgggttgttctgctataatgtgtggtatcaaataatagctttcactaggactctaatcgaaagactttttttggtttgtttctggactacctggatcctaaatatgtaaatttttcacttttagctttcatttattgaacattatttttcttttagttgcatttgagtttgtctttgggttccggaggtgaagaatcagacaaagaaaaacaggaaatgtttgcagttcattctgtcaacttgctgttgaaaagcataggtgctactctgactgatgtggatgaccttatattcaagtaagacttctgttagagtacattgagaagcaggtgtaccaaggtcatgtttctagacattaattctctccacttgtgcaatgttagcttaggaaaaggataactttactacttatatttggagaatttggttcatttgtgattatactctttaggaatgcttattgtattcataatgataaggtgtagagtcttgttttttgttttttttgattactcatatctagataatacatggatgtagaataataattgaattttttagtcatatattataaattaaccatattttaaaacataattatatttagagatatgtaatgctagatacatatgcattaaataaattgttattgaattgaaattcaacaatggtattggaacaagtagttatctgggtgaaaaaaaattccctgtagatcatttttaccttacatgtacactactaaatttcagagaaaacgaatgataaaatataaaacctaaactgaaaagacaaaaaaagtccaatctctgaatagaggaggtctttctaagtttaaaagcagtggaaaacatttcaatggaaaataaaagatacatttaaccacataaaaatcaaatactttacaacaaaatcaatgaaaataattaaaaaacaaaagcctgggaaaatataatgacagagaaaggactgttatcttaatattaaacattgagaagaaaaacctagattctaacggtataatggccagagaacaataggagataattcgcaaaagggaaaacacagtgatggcgttattatttatcaaagaatacatgcaaattaaagcaaattatcaaagattttaaaatatgagcgattctattttaaaatcctatttaatactagtcaggggtggttctaagaaataggtactttttaaatactgttggtataagtggaaaactgcatttgttaggagccttcaatgttttgttgcttttcactcagtagttctctttttggaaattctttccaaaaagtaatctaaccttgaagttcaaccaaagagttatattcaacatacgcatggcatcattaattattttagcaaaaattggaaatgtctgacagtggaagaattgtttgttaccacactgccacatggtagcatgctatgcatccgttaaaaatggttatgtcaagttttaaataacatagagaaatacttttccacagtgttgagtgtaaacagggcatacaaaatgttttaaacattttatcattgcatataaaagaaagaattctaagtgcgaaataagaaaataaacctttaaaatccactatgtgatgggatgatggttgacttttaaagaactctttatgcatatatgaaaaacttgtgcactgtttttataataatttagtaaccattattaagacaatcataaattgtatgtggtaaatgtacgaagtcaattgtgaaagaattggctatgattagcattagctgtcattcaaattttaagtctctttttttatcatataatattagtatctttgaatctttcctttttctcctcccagacttgcttattatgaaattcgatatcagttctacaagagagatcagcttatatggagtgttgttaggcattacagtgaacaggtaatttcctatcatagtatttcataaggaatatacttcataaaatatcaaaacatttgcatgtgactgtatagtgtgcagtaatgtttatctaatttacctcactttgaaatctccgtatttagtggctttcttcaatgattaatttctgtttctttagttcaacccctctttatacaccttttgaaaattttcctccagttccttttttgactttgcaattatacttttaccactttgggaaagaatagtgactttatagtcattatacttgatttcttcagtgattatagtttctgaatataatctagtgaactgcaagcagaattctaagccggtttcctccctgtgcctcagttactctgtggttcaagtatgtatgcatagaaacagtagttgttgcaggtcactttggtacaattgctataccatggaactgcatggtgacatctcctttccttccactgctggaatattctttctcctattacatatacagacattatgattgttacatgttaaaatgaggatatgttttcccttttttttgttttggttattattttccatctaatttattaataatgatggtaaagtaatactaaaaaaaactaacaattactgaattatgtattcatttaatatgcatactcacccatgcaaggacagtgtaacttccctttttaaaaaattttgagtttttatagagacggagtctcactatgttgcccagactggtcattaactcctggcctcaagtgatcctctcatctcagtctcctaaactgttgggattacaggcatgagccaccacacccagcctgaccttccattttatagattagaagacaggctgttagatactaaatgacttgcacaaggtcacataactgctacgtggcagcctgtgcgtcaaacctagttctgtctaatttaaaagctgtttaaattagcatagtgcctggcacacagtaaaagatccattagtggaggtagtggtgattattccatacagctttcttttaacacaaacttaattttatcagtaaatctctttttttctatttcattatgatgtttcttacaatagttgtgaaggacttaatttaattttttttcttttttagttcttgaaacagatgtatgtccttgtattggggttagatgtacttggaaacccatttggattaattagaggtctgtctgaaggagttgaagctttattctatgaacccttccaggtattgacctcttatttgttctaaggataggtatagaaaaatggatggtctattttttaataacaaatagtaatttgcattgtaattgtatcttggaattgaataatgttcaaatcacaaaagtatatcaattttatatttttatttaaaggtacatgagataacattggatgattgtttagaatttaatgagcgctgcccacatttgccaggatttaatgtagttgtaagaatatttagagtgctgggtagattaagactttcaagactgttccaccattgtggaagggactaatagggcactgaaagcaaagtttgtttcatattcaagctgtcatctaacctattcccctccatttaaagggtctagcagccagcccagtgtatgagggttttcggagaataaagcagagaaaataaatgagagaataagacagtaaaaaaatctgtgggctcttactcttgttatcactgcatcttgttttagcaatttgatgaaacttagttctgggaggccaacttcaaattgtaattgaagccagtgatttatacctatccaatttttgacttaaagaatttgctaagatcatgtaggttgaaagtgtcttcaaacacaatagatattctatccatatttggggtagaagtgaaaattgattcatcacaatgtttatggatttttacagatttggattcttcttgcaaaccctgaactattaaagtaaaagtctgaaacttaaattttaaataataagattattttttatttttttttgccagggtgctgttcaaggccctgaagaatttgcagaggggttagtgattggagtgagaagcctctttggacacacagtaggtatgtatcacatatttgtgtatatgtgtatattttttattatattgttatgaaatatgttgttatgaaaaacaaatgcttttatttaataaaggagggatcactttcttaataatcccttttaaaagacatgtttcccatgtttttaaatgaaaaataacagtagactgctggttttttaatatgtctttgtagtgttgaataaatgcaaataattttacatttaaattaaataattttattccttttcttgttagatgggaaaagttaatttctgcattttttgtatgagacagaattttaagcacctattagtttaaagcaattgcatgctatatattgtgataatgctgtttatataaacaatgtaacttctctgagccttaaaaaattattttatttttaattgacacatgattgtatatatttatggggtatagagtgatattttgataaatgtatacaatatgtagtgatcaaatctggtaattagcatatttatcacctcgaacatttatcatttctttgtgttgggaacattcaagaccctctcttctagctatttgaagacatacaataagttgttgttaactatagtcaccctacagtgctatagcatgctagaacttattctcctatctggttgtgatgttgtatccattaaccaatctctccctatcctctcctccccctacccatctcagcctttaataaccacagttctactctctaattctatgagttcaacttctttagctgtcagatgtgaatgagaacatgcagtatttgtttttctgtgccagacttatttcacttaacataatgtcctccaggctcatccaagttgctgtgaatgaccggttttcattttttttaatgcctgagtagtattctgtttgtgtgtgtgtgtgtgtgtatcacattttctttatccattcatccgttgatagacacttagattgattgcatatgttagctattgtcactagtgctgcagtaaacatgggagtgcagacatctcttgatatactcatttcttttcttttgggtatatacccagtagttggattgctggatcatacggtagttctagtttcagttttttgaggagcctccatactgttttccataatagctgtattaagttatatttccactctcagtgtgtaagcattcccttttctccacttctttgacagcgtttgtgattttttttgtcttttttataataactattctaactggggtgagataatatctcactgtggttttgatttgcactttcctgatgattattgatcttgaacattttttcatatacttgttggccatttgtatgtctccttttcagaaatatttattcagatcgtttgcctattttaaaatcagattatttgttttcttgctgttgagttccttgtatagttccttgtatattctagaaattaatcccttgtctttgataggtggtgcagcaggagttgtatctcgaatcaccggttctgttgggaaaggtttggcagcaattacaatggacaaggaatatcagcaaaaaagaagagaagagttgagtcgacagcccagagattttggagacagcctggccagaggaggaaagggctttctgcgagtaagttctttgctgaatctttaagaaatctgcaacttaaaaaaaagtgtattctagctggttgtgtgaaacttagaatgctgcttatgagtctaggcctgtaggaatagaaagaatgataaatgatggacttcccagtttcctttttgctccccttccccattgtcaccaccagatctatcccctgaattgtcagatttcataaaactgtaatgatgacagggtagtactggtgtagaaggcgaggaagtgagaagcagagatacatggtacctatggaaactagagggagaaggagctctgcaggtcatcagcaactgactgtttctgtggaagggatgtgtgaaaattaattgttgataatccaggaactgcctttcattactttttaatacttttaaaattatataggtaatatatgaatactgcttaattatataggtgatgtatgaatattcttataattataagaacttaaaagttattgttaataagtaaataaaacattataagtaaggctagaataccctaatcatctcatctgtttccaatttaagtgtgtatccatcagttctctttctgtgtgttcatagaatatacaggtattttactaccattacttcataatgatgaaaaatgtattagtatattcatgttttaattttggaaataatttcaggaaactgctgtgttttttgatagtaatttgtaatgttgggtgttacagttactaaggcactttatttgccaggttattacctgtccctgggagggccctttattttcagttttctacacttccactaagttacaatgtaatccccttaaaatttataattagatagtaaatattatttggctcaactcactcattttgctgatgtggaaactgagacttaaagagatttcagctacccatggttacgtagctgattggtgtcatagccagatttaaaatccttttacctgctttactcctgtttcttttataaaatttataaaatgctttcatttaagatttgctgtgatatgatatttgaaaaatcatagtgctaacttatatgtgtatgttgttcacattatcaagttaagtcttcaatttttgttgttgttgttgttatttccagtatgtctgtagagacctctagtggttggtttaaaattaaacaccttccattcagtctaaactatatgattgatttctctttcagggagttgttggtggagtgactggaataataacaaaacctgtggaaggtatgttgaaaatatttccttcctttacaaagtctgaagacttgatgctattagtaaacatagtagatgttattgctgctatatacttgattgagaaaattactgactgaattttatattcgtagccttaagttgctcaatgaatgtattttccttagaaagcagagaggttaagtagtagatcatgcttcagactttgaatgctatttttagcagggccagagataaactagatttgtttgggtcctcagtagcaatttactcagttttgctgttgttgtttttatcccattaaaaaagcacattgcttattcagtgcaacccttatcaaaatcccagttggtttctttgcagaaattgacaagccaagtccaaaatttatatggccattccagggatcccagatagccaaaaaaaagtcttgaaaaagaacaaagttggaggacttctacttcccaaattgaaaacttactgtaaagctacagtaactaagacagtgtagtactaacataaggatagacatatagaacagtgggatactattcagaaatagagttcagaaggagtcagaaatagactcttacttatggttaactgatcttcgacaaggatgtcaagataattcaataggaaagaaccatcctcaagaaatttgctgggacaacttcatatctatgagcaaaagaacaaaattggacccctacctgtaccatatataaaaatgagttcacaatggattaaatacctaaatgtaagagcaaaaccattaaactcagaggaaaatataggagtcaatcttcatgactttggattaggcaaaactttgctagaaaagatacataaattggacttcatcaaatacataaattgaacttcatcaaaatttaaaatttttgtgcttcaaaggacaaccatgaagacagggaaaagacagcccacagaatggaagaaaatttttgcaaatcatatatgtgataaaagacatatctagaaaatatagagaactattaaaaatcaacaataaaaagacaacacaattttaaatgagcaaaagatatgaatagacatttctccaaagaagatatacatatggccaataaacacataaaaggatggtaaacatcattagtcaacagggaaatgcgagtcaaaactatgagataccgtttcacacctactgggatggctagaatcaagtgttaagaggatgtggagaaattggaaccctcatacactactagtgggactgtaaaataatgcagtcattttggaagaaaatagtctgtcagtgcttcaaaaagttaaacacagagtcaccatgtgtcccagcaattctactcctaggtttatacccagaagatttgaaaacaggtgttcaaacaaaaactgtgcacaaatgttcatagcaccattattcaaaataaccaaaagatggaaacaacccaaatgtccatcacctgatacatgaataaacaaaaggtgatattttcatacattagagtagtactcagtcataaaaaggaatcatgtactggtacttgttacaaaatggatgaaccttgaaaacatgatgctaagtagaaaaaaaagtcacaatacaccacatattacataattccatttgtctgaaatgtccagaataggcaaatccatagggatagaaagtatctgtaggtggttacctagtctggaggtggggaggggcagggaggaatggaggtacactgagtaagatttggtggggagaggctgggggaaatagggaatgattgctaatggaaagggggtttctttttaaaatgataaacattttctgaaatggattgtggtgatagttgtagaagtctgaacatactaaaagctaatttatcctaaaatttaatttgtacattttaaatggtaaattttatggtatatgaattacatttcaataaagttgttatgtatttttttaaaagcacactccttgaaaaatctaacggtcagcattaaaaaagagaatgtttactggtcccttcttacacctgcaagttgcaggtactgatgagactcctagatcagtagttctcaaacttgagcatgtgtcaggatcacctggagtgcttagaaaaacataaatgctggccccgcccccagagtttctgattcagtaggtctggggtggggcccaggaatgcgcatttctaacacactttgagaaaccactattttatcacattaggattacatttaacttctttagaaagccaaatttttgtaacttcctgggtaaaacagttcagtatctggcccaggttttggttgagctcaaacttgctcatttaaaaatatctttatccattcatggtcattggttttctgaaggtgccaaaaaggaaggagctgctggattctttaaaggaattggaaaagggcttgtgggtgctgtggcccgtccaactggtggaatcgtagatatggccagtagtaccttccaaggcattcagaggtaattgagtacatactatgtgcaaggtatgtgtctgtgtgctaattattacaaggaatacataaatagattagattatttgcctgctcctaaggatcttaaagtctaattgaaagctgtggtagctttaaaacatagagtgcctccagaaaggaataagaaaagacatattttgcgaacatggtgaaaccccatctctactaaaaatacaaaaattagttgggcgtggtggcgggcacctgtaatcctagctactcgggaggctgaggcatgagaaccgcgtgaacctaggaggcggaggttgcagtgagctgagatcgtgccactgcactccagcctgggcaacagagggagactttgtctcaaaaaaaaaaagaaaaaagaaaaaagaaaagaaaagagacatattttatggctaaatttctcttttattcaacaaatgtttattacctaccatgtgccaagccctgtgctagacaccaaggatacaaagagtagatgagctaggccctgcttttattattttgatatttctttttattttagaaaaggttgggggatttggagtcagacagacttggttttaatacttttgcattatttggggaaagctatttaaaattactgattgttttttgtgaaatatttatgtatttaatcaacacacacattattttgaaagactctcacgtattttcttacacttactctgatgccttattcagggcagcagaatcaactgaggaagtatctagcctccgtccccctcgcctgatccatgaagatggcatcattcgtccttatgacagacaggaatctgagggctctgacttacttgaggtaaattttgttcttcatggtcacgagtgaaatggaattttaatgatttctaggcccaggatttcctaggtggttcttaaagttcctgattcttgaactgctttaagtattatacatagtttctagagtagaatttgattgtttttcattttagcatgtgttaaatggaaattacagatgattttttttctacatgggagcaaagcttttttttgtgtgcagaaaagataatgttaagtcataggctatatcactatttctgtgatagctcatttagttaacattgttaattttgttttcctgctttgtagctgattattggaacttcattgcttccatttctcccaaccaaattaatttatttgcactactttgtaaatctagatttattccagtaactagaagtagatgagagaataaaagattatgtataattatgatcttgttaaaccttaaaaaaaatttaagagctttttggcttttattttagttttaacttgattatattttgataatatatacatatataaattgctattctcccatgacaggctttcccccaaaagaaatgtattaatatttttctaccttgactttaaaataaaatgcctcttaattgttcttcctttggtttttattgtatatgattacgttttatctatctttctgcatgcttctaactttattttctttgtttttctgcctgcacagcaagaactggaaatacaggaataaatgtttcctaaactactacttgatttcatccttaaaaatcaaaacaaactgtggtgttaattgactgtgtgtgaattccattgtcaattttaatgaaattttctttaaaactctcacctccatctgaacttttcatagtagtgggattgactacaaataaaaacttgtggtattcctggtaatactgtccagaaataagagattagtataaaatattaaaggatgcagagaatcagctctcttctgcgtttaatagatgaaagcctttattgagctcagaagcagatactgttactatcatttcgaaaattttatcttatggtgttcatgtgcatttcaggtaaaattgaaaaacaggacaattattatgtccaattaatatgtttatgtttgtgagtcttgatgatggaattacatagctttctgtttcacaaatggctctaaatttgcttaagttacgggactattacctggagcatctgctttaataattgaattgtcagttgctctgagcctgcccttagacctcaagtaataaatagttggcacatgaattttgaggatatgtttcctcttccctctttttcctatttaaccccttggtactgttgctaaataaatgatagccattttataattatgttatatacattttcagcctttagcatttctgcttttcaaaaattgaatctccttgttggttatgcttatttcataattattagttttaattaatgtagatagaagttgaacatgtaattaggcaaattgctgtgtggcacttgaatacatagatttctttattttcaaaaaccaaccttttgcttttaaatccttagagagggtttattatcttagagaaaaaataattataatcattatttttgaaattagtatcctcttaattctcaacataagttatgtttcaatttcttttttttgtaataaatgatggaaatgtttaacaatgtcttatctagcaactttcatgcttctcctcagaaatgaagccaaagtataaacttagatttaatgtgttgtatatttgaagagaatgaaactattaacatataattgttcagttggattatgtattttaaggattgcagttatcaaaataataaattgaatgttttatgtttaaccactttaaagaagaaagactgacatccaaaaaccagcgtgtgctagatatacaaaggaaattacttctgtccttaagggaccaagtataacaaaacatgtaactgttaaaagtagctgacaaacctttcttgtgcctagataatttagcattggcaaaaatgtcaccacatgcagttttctaggagagtcaagcacaaataactaattcaagatgctgacttaaatcatctccaatagttacccttcctgagattctaaagtaacaatttttaattttactggttatattgctgttttactgagacttacttttaagaacccctgtaacttaagattttttcttaattgttttgtttagctctgttattaattttttccttgtgatatctttttataactctctgtcaaaaagcacaaaacttcaagaaacttttaattattttgtctgaacatataatcttgtctgatttcttagtttttattaagatatcagacaacttttaaaactttagtgcattattataattactggaagaaaaagaatgattatacactaatgagaggacttggtagtttttgtcgtggatgtcaagtgtgggcatggataattgaaatatttaggctatttcattctttgcccatcttgctgtgatcagttagttgggtaaaaatatttattgattatttagactgtactggatatacaaaagaagccttctgtccttaagggaccgagtaaaacaaaacatggaaatattaaagagtattagagtataaaagtatatctttttagccctttgtaatatggccaaattctaaataatttatttggggatcttttgatcctcatgttcctttttctcctaagtactactttgtattctttaatatgcagctttgagagttactgaatcatatattatatttccatgagatgtactattctacttatcctctaatcttcatatatatatacacacacatatatatacacatacatatatacacacgtacatatatgtacacatacagatatacatacacacaaacacatatatacacacatacatatacacacatatatatacacatacaaatatacacatatatacacatacatatatatacacacatacaaatatacccatatgtacacatacatatatacacatacatatatacacacacatatacacacatatatacgcaaacatacacatatttacacatacatatatacatacattatatgtatgtatatatagtcatttaatactcattttggttcacatacttatgatcatgcaacgtttaaaacagcatttcttgctttttagttttagttatatttttccatgttcttagaaatgcctcattaacatttttaattcttgtattgccatctattgaggtgacattacattgtgtttttatctcttcttaattcatgacattaaattattctactaacagtaataatgctgtaataaacatcattatagattttgcttttttatatcttgtttgctttttcatatttccttagaatttacttgaaaaaattgaattactgggtaaagggcttttgcaaagtattgttaaattcctcgagttgcatttttggaaaggggacgtgaatattttatcaactaatttggtctccctgctgccattagtgactgaatatcttaatctgaatctcagagtgtagtgggtttttagtagtgctgaagacaagttttctaaagtgtattatggtgataaattatattttaaaaactgtcaatggcttgaagcacaatagcctaataactaacgaaaatgcatacaagatagaaagtgggtagtatttcttgtacttgcatttcagatctaaatattttaacatatttaaatttcaagctgcagataaatgcattacattattaaattcatttcccattttctctttgaagaaattaaggcaaaagtgttaaaagattttaactaattcgcacaagtgaattgtgaaacaagtagctattgctgtgaaatctgcactcctctctgagactcattctgaagatgagatcccagttctttgtggattcctcttccttattcatggctttttgcaattgtcaaggaatgactaggtaccaagcaactttaaaaaatgtatatttaagcattgaaataatatcaaatgtgatttctctgcttgtggttatattgattatattatccttttaataatattggcattatattcttggtcgtaaaatgtcaaggtcttatttattcaatatatttatgttctgtattttcatatatattatctattttcagccatgcattatatataatgtcagtaatagtatttcattagcattcattataaaaaaactcgtttttaatatttgactaattcaagtcacagtacttttgagatagctgaaaaggaaaataaatgtgttttaatgtgctactacttatacttgaattattttatgctcatatttgtttttagaaataaattgtgccagctattttgaaatcttagaaattgttcatattaatattgtcatattttcttttctataagaaatataatttgatatataaatatacttccccacgcatgtttaacgtataagatcaaatgttcaaagcattaaacattaattatcttggaattttattatgtgtataatatctactaatacctctatgtaaaccagtggttcttaatctttgagatcacagacccccctctgtgattaaaaaaaaactgacaaaaaatattaactgccctgaaaaaagttttagaactacgttttcaaaattttctattttatgttaggtggttcagagacccaccgcaaagtgctaccagtgacccctatttcaaatcccctgtaatgttaatgtagttattttatattagcatatgtttcttaattaaagtgtgtgataattgctggtagatattttaatatttctaagttactacagaacaaaatgtattttaccagaagaccacttggtaagcatttattacatgtttttcttttaaggcaacagtggaagttaacttacaaacatgctgtgaatatttttctagcttcatgtaccaatatgtagaattgtgcttttatttctaattaattttttcctaacactattattataattagctaatatgcagtattgtaaatactacttaaatgcataacttcccaaatctagagcctggtttccttttcagaatcatatcaaaaagttggaaggagagacttaccgataccactgtgctattcctggaagcaagaagacaatccttatggttacaaataggtactgacttgaagtgacatttttccaaatagtacttagttgcataggtcacaagaattttgaaggctaaaatggcagaagagttggaaaattgtacttaaaattctccaaagtgaatggcaaaatgttcattttcatagaatcacaatacagatctaaataggtcctttgagattttcttttccgacctcctcatctgaaagatgctgaaactgagactcagtgtggcttagggacttatccaagttacacaaccactgagagaatgtagactaggctttatacctgtaatagtgataccctttttcatgaattacaagtccagttatggaggattaattcatgaatcacttttgctactaagttttattttgagtgattagcataccccttttaaagggtggcattacttctatatgtttatctcagcttttcctaagcatttggttgtggtagatttttccaaatagaagaacttatactaaactaccaagcttattttcctgggatctatcctagataataaaattatcccaaaatgacaattatatattaataattttcagaactttcttagtgttgagctttataagagtaaggcaaagttcttacagtggcaaaatctgcattagattcctcatgactgcatttaaatttgtttgaatgggaataaagaaaagctgaatgacaggataagagaggttaaccagtcatgtcagaatcctcatgtaagagaggattctccagtcatgtgatttgctcattagttaagagttaaaaatattcacaaaacaatctaaaaagcagattttatgactttgacaagtaatcacttattttttatgtccataattttatattgtcttcaatagattaagccaaaaacaatgtttttttgtcttagatattgtacttagctgttgcaatgtgttaattcattttaaaattgtatcacttttatataattcagtactgggcaatgagaatcaatttggggtttttttggtaatacttattggtaatacttagtacctatttgatttaagccattctgtgggagtattactgtatacattatatatctggtttttcttcaagtacattgaaaaatcatcatcatttgaaatctagtcactgatggagttgtttaggaggtaattagtaaaatatacctgaccagtaaatactatgacttagtttccttgctaaccttacttagtagactccttttcttttctcctttcctttccttttccctttcctttccttttccttttcctttactttttctcttctcttctcactcttttcttttctttttccttttctttcttttttttgagacagggtctcactccgtcacccaggctggagtccagtgatgcgatctcagctcactgcaacctctgcctcctgggttcaagtgattctcgtgcctcagcctccccagtagctgggattgcaggcatgcaccactatgcccagctaatttttgtatttttattagagacggggttttgttatgttgtccaggctagtcttgaactcctggcctcaagtgatccgtccaccttggcctcccaaagtgccaggattacaggcatgagtcacagcacctggccttagtagactctttctaacaagaatgtatttgattgaggtagttatcattatggtaatcatttagacctttaatgattacattaaaatagtagcatttcttccaaattcagtattcttaaaaataacattttcttttttaaagaaatggggtctctcactatgttggccaggctggactcaaactcctggactcaagtgatcctccagcctcagcctgttaagtagcctggactataggcatacatgcaccaccacatccaaaataatttttattgctaaagttatggctattcattgtagataacatagaacaggagtcaacaaactttctttaaagggacagatagtaaaatttagactttaagggccatactgtgtttctcaaccttttgtttttgcccttatagtaagaaaacagctatgaacagtatgtacaagaatgacatagctgtgttccagtaaaattttatatattaaaacaggtcttgggctggatttggcttgaagggcacagtttggccaccccagtattgaaaataaggagatgaaaataggctgggtgtggtggcttaagcctgtaatcccagcacttttgagaggccgaggcgggcggatcacttgaggttgggagttcgagaccagcctggccaacatggtgaaacctcatctctacgaaaaatgcaaaaaattagctggactttgtggcgcatgcctgtaatcccagctattcgggaggctgaagccagagaatcacttaaacctgggaggcgaaggttgcagtgagctgagattgtgccactgcactccagcttgggcaacagagcaagactgtctctcaaaaaaaaaaaaaaaaaaaaaaaaaagaaagaaaataactaaccatacatgcgttctagtttgcctaggacatagtagatttgcttgcacgttttgtccctatgtaattatcaatagctattcctttcattcttaaaaacatcctggtttgaataacagattatatgatcacccctaaaaatatcctttaccagcaatgtcagcacccaaagataaccccattagctggcacattttacgaaaactatgtacaaaaaaatgcattattacattttagtcttgtcaatttttcatgtaacaatatactgtcatcatcttcccaaagcattaaatattctttgacaacatgatttttaatgactacataattttgtatttgcagatatgctataatttattaaaatactccctcactattggacattttttccctaatatcttattgttatttatttgtaaccaaatctttttctattattttattagaataaaattttaaaagggggattgctaatttaaaagttgtgaagatttttgaggtcctttctgtatatcgccaagtcatttttcagaaaggttgtatcagtttttttacataccactcaacaatatatgaaagtgttctttctcctgtgttttgctgagactaggttttatcacttaaacttttattttttgctagcttgatgggtagaaaataattttttgttttaattagcatttctttgattactgttgagcctgtaccttttaatatatcatcatctatttatatttgctactttgtgaattacttgttcatattctttgctcatttttcattggtatgttagtctttttcttactgaatttaaagagcattttgcaaattaatgatattagccctttttgtcaaatgtattattgacatgttagtgattgctaattgagtttctcagtatatagcatttttttgttttgaaattcacccaaaacttagtccctgaatttttttttcttatgagtttttaaaatcaaaacacaagttctcaagacctaagtttcttaggctatagctttactagttggtcctaactctgctatagtttattttagtaatctttattgagaaattcattattgagcagactttaaaaaaaaaaaccatcaacatatgacaaatacagggacacagagatgaagttacatctctgttccttccctattttaatgggcagggggctacaaattatcaatgatatcaccgtgtgataggtgctaagaagagcgatggacagagtctctgaggacatagggaaaactcttggtacagtaagatggggaccacagtgtcatgggaaaagtgtcagggaggcttttatagatgagggagtgcttgagctgagtcttgagtatgtagctcttgcataggtaaactagaggcaagtggaggcatacaatagtatggcactttgaccagtaagatcagtgtggaatggctggatggtagggtgttagtgttgggagatcagtcataggtagcagctcataagattctaagggtttaggttttatcattaatgtgatggagaatcactggtttttgcttaaggtatagtctgctattttatttttttgaaacaggttctcattttcattgcccagtctggagtgcagtggctcgatcgtgattcactgcattctcgacttctctgggctcaggtgattgtcccaccttggcctcttgcatacttggtaccacaggcattcaccagctaattttttgtatttttagaagagacagagtctcactatgttgcccaggctggtcttcaactctgggctcaagcagtcctcccaccttggcctcccaaagtgctgggattacaggcatgagccatcataactggctggcagttatttttttatttgatatcacttgtagcttctcacacagaatagtacacacgtgagtaatctctctttttttctaccccacagaaggtttgtaaacaagtaatatgatgaggcttgtagttttaaaagatccttggcggtttggatgttatactggaagagaatcagtccagaggcaaggagaccagttagagactgtatacgttttgtattgctgcacaacaaattaccacagaatccacttccaagctcatttgctgttgttggcagaattctaagatccctgtttctttgacctctgtcagccagcgagctgctcttagctcctagaagctacccttattccaacccaacaagggtgctttgaatctctgacttcttggtctcttacgcagatttatagtccatgaacttaggtcaggcccacctacataaactatttttgctcagagtcacctgtgccttataataacctaatcttggaagtaaaatccattatattcaaagtccagggcactatacagagatatataccagggttggggaatcttggagacttgtcttagaattctgtctaccatagagactgtggcagctatcatggtaggaagtggggagggcctaaagaatgaggatttgacttatgagacaaggcttggtgactgagtggatgtagaggagaaaggaatacatgatagggagggagggagatagatagacagatagatagatagatagatagatagatagatagatagatagatagttggagtttggataaaaatctcgagttgagatctgagagaccattctgagggagtgtgtgagtagaagaccaagatttgaaccctggtaaacatggtgcaagaggaagaaaatgaaggagacattctaggtggaaggagaacggtagtattattgggatggtaaagagaagagtttaaagatatttggaatagtgaattgtgtttggcacgaggatttgtgacagccatccttagctctgtcagctgattatcgactggggccgggagtgtgggcagtggagactgtttggaaatgtatggtggtgttggagattgccacagtgattgtaggacactactgccacttactaggctggggctagggatgttgaactttgtccagtgcacaagaccatcccatacaagtccaaaatttaatagcacctctgctgagaaatataatgccagggatctatttcagttctccacactccattggtcaccatgttcattcatgtctgccttctaaacatctcaatctagccctttcttcccccttctcagagccactgccatacttgaggcttccattgtctcctgattggactatttatattgccgtaacttcctaccttgattgtctattgccactctctttgccacctcccttctgtttaccaccagaaccgtgaatctaaaatatttcctcttcattaaaagtgaaagaacattatcacgtcatttcctgtttcattaaaagtgaaacattttttaaaaggaaaaataatagcccttcaaggtctggcgctaagctcattttctcgcagcttcaccatggtatctatcttgtattccagctgcagacctccacattcctcagataagtctttccttttttgtactcctttatatgtcagtgtgttcctccttttgtctgggctgtcatttcccttacccacatagagaactccttcctttcaagaatcaactcctgtgtcacctactttgccagtacgatctgttcctctctctctctcgctccaaaagactaatctgcacactctgttacagcacttgtctaattgtgctgtagcgtttatttacatgtttgtttctcctctagccagtgagcacctctcaagcagaattatcttccttgtttctctggcaccctaaatatttgttgaattaatagtccttctcttcttttgtaattttgctttctgtaatagaagcttaattttaagtatagttatatcagtaatcaaaatgaatcacacactgagaaatcaatgtggatgccctttaagggttctgttattttttttattgccattgagtaaaataagatactctgtgataaagtatattagcattaaagtgttcaaatctgatctttattagtaggcctcaagtgaatccttgctgacatttaaggtttatgacatttccttcacgttcgttcttgactggaaggcataaatggctgacagtaaagagcaattaataattttccaagtaaaacattttcagggacatctgcctttattgctccccagatgagagtacagcctgtttcttatgtgttccaaagatgatttccctatcagctttttggtcagttaaccaaaaaaaaaaaaaaaaaaaagaaaagaaaaaagaaaaaaaagttacacttttctgaattctgcaagattgacagaaggggaatttttgagtctactttgttgcttggtaggtgtcatatttgctctttatttgacagttatctagacttaaaaaaaatgaagcaggtttttttttagtgccagtttatattgtttactaagcaagtgctacctctgccatccagtagggtgaaatattggcaagaataaactgtcttcatcatttactgtaagtttttgttttcttttgcaaaataggcgagtgttgtgtataaaggaagttgaaatcctgggccttatgtgtgtagactggcaatgtccatttgaagattttgtatttcctcctagtgtcagtgaaaatgtgctaaaaatttcagttaaggtaagaaaacatgtcacacctttagagctaagagttcattgcttttagactgttttgcagttaactacacaaaatatttgaaggattagtgtcgttattactactatatgctgagatgtgaagaaagatgtaatcaatttatttgaataactgtacttattttctggcagtcttgattgcatagagtgaaatatcagtctacccacccaaataattaagattctcatatgctgatattttctttttggtagaattaagcattagtaaataggagaggttttttttttaacttcatatggacacccatgttgctgtaatcttagacatttctggaaagattccctctttttaggtttttagaagattattaagtgatttgataaaatgtcttttctcccatcattttgtaaggaagcacttttattttaattacatagtaatttgtaaaagtgatactctgtcttttgcttagttcttagactcaagtacttaactttctttgaaatatgtttgttacattatatattataaatttattttcatgcctttaaaaaactataaattattattctaaatatggcaatttctttagtgcatttgttttccctaaacaataatgttatttctattagtgaaactatctgcaaaactaaacgttttttactgggaaatttagtagctagaagaacatttactgtgaaatttaatagctatagatgtgagtactgttaccctttaatttatgtttacttatcttttcatggaaatttacaaataaaggaaacaccgtgttaccctaccattttgtatttcagcattactacattgtagagtgtcaaaatttaaggaatgttttgatgtatgaaatatagttttcaaactaggaaagactatgtcactgtgcatatattttatagtttcctcagttatcacttctctttcacatcaatggtgagaattgactcagtgtattttacattatacagaaattttatgtatcagccaaagaaatgaaggaagggttttttgatttgtcagatgtgatgagttaccaagtggtgtttctgtaggctatttatcatagcctgcagaaagccattattttatacagatagatgtatgctcatccaattttataagttctaacaactcacatatggaaataccgtccttgttccaagatgatttatttcatatcttacttgaatatgtgtatttggttagcctacttgttataagatagagttgacatttaagtatacaattaaaagttaggaatttttttcttcctcagaataatttcttttctgtcattgtttcttttgaaacaggaacagggtctgttccacaaaaaagacagtgccaatcaaggctgtgttcgaaaagtttacctgaaggacaccgccacagcagaggtaaacaatttaaagagcatgcctcaattttttttagctgaaatacttttttaaaagcctcttataatgaataccattatttctcccaaagctctcccaattataactatggatggatatataaacttaatatgctgtggactcagtcgggtgcaagggtcttatttttatatgacacatctggactgtatccttggtccttagctgttggtcctgtttggagagcttcagcccttgctttcatacctttcccttcaaccaaatgagcctatacttgtctttaaaattcataataagtattttactttacagagagcatgtaatgccattgaggatgcacagtcaacgagacagcagcaaaaattgatgaagcagtcatcagtgagacttctcagaccccaattgccatcttaatcacagacctcaggggctccaacagggagaaaaaacaatcactggtcttgtctataagtcactctgctttatcttgctaaagacaatttttcaagcaatcctttagttttagttttctggaatagctagtattgggttttctagttttttcaccttttagtttttactctaattttgtaaccatgtatatgctagcagtccacttctacgccaccacccaaatgggtcagacccttgaagaaacgtcacttcaaactcagaatgaaattttcattaatattaaaattgtgaagcaaaggtcaataggcttatatttaattaaagccttactgaagaataagaaatgagcttagaatgactagtgttctttgaaaggtttttttatttttgtttttttggggtttttttttttttttgagaccgagtcttgctctgtcgcccaggctggaatgcagtggtgcgatcttggctcactgcaatctctgcctctcgggttcaagctgttctactgcctcagcctcctgagtagctaggattacaggtgtgtgccaccacgcctgggtaatttttttttttttgtatttttagtagagatgagtttcaccatgttggtcagtctagtctcgaactcctgaccttgtgatccgcatgcctcagcctcccaaagtgctgggattacaggcatgagccaccacggcccgccaaaaggctttaacccatgaacaaatgttggatcctgacattttgtttaagagtgatttgttcaataattgaactgagttaacattcttggtaaaccaggtaattgaatgaagaaaggtcactaaagggagaaatgacatgttttctattttcttttcatgaaaacactgtttttccccctaataaagcatattttactttggtgcttatttttcctccttgcagtctaataaaaaaatctggacaatcaaaccttaaaatagctacactctgccctctgtaatgtagcattcataaaaatttggaagtatttacatcctctttcaagatgagcttatatgacacaattattatttgctgatacatgaaaatactgcactttaagtttctcaagactctgaaatatgtaaaattcaatatttttatattcccagaaattgtttcttacaggttgaaagtcttttaagggcatcacaaattaacatttactcctaatgcacgcctagaatgtattttaaatacttactaagaagaatgaaaattctttggttgttttatatataaataaggcatatataatgacactgtgttctgtgagggagcaggccctgtgagaatcaattcaggacagtatttttttttgtcctttctccatccttgatcagagataaactattaaaactttaaaaaatactcaaaaatatgtaagttttttggttgaacctttagatttgctcataatgtttaacataacaacatttatttcaaatcactgaattcatggagatgtggacacgcttggtttgctctatttttgtttatgtgtgatagtggttctgtcatcatcattcatgttttttaaggcctggtcataaaactttaaattttactagtgttacttaatgtatattctaaaaagagaatgcagtaactaatgccctaaatgtttgatctctgtttgtcattactttttcaaaattatttttttctgtaaagtataatatataaaacttcttgcttaaattgaatttctatattagtggttaattgcagtttattaaagggatcattatcagtaatttcatagcaactgttctagtgttttgtgtttttaaaacagaattaggaatttgagatatctgattatatttttcatatgaatcacagctgttgacaatgtcccatatatttaagaaattatatcatactgatactatttgtaacattttgatttgatttaatctccagggacagaaataattcattggtaaagtgtaataatgcgttttttaaaaatgctttgagaggtaattacttgcatatgagagaaataaaacatttggcacattgtttacaggtgtgaaaactttgtgggtttgtgttattcaagtaacatttgctttactttttgtctttcccttttcctcttccaatcccaaaatagtgagaagttatattgatagttatggaggactttacaagatactagtcagaaaagctttttctcaggggtactgagcccctttatcacactagagatctgtggcagagacctccaatactgggggattacagagaatgcggttgacctaggggcccagctgcactttgaaatccattgctgtatttgcattgagcccatgccttccgtggtttctctcagcgactggctgagtatgaagttatactaagacatacttagtctggaaattctaggagacacagaactcctctgacagccgactttggcttgaagactcttcagtggccttgcagaacctttcttagactgcatggcagtctgggatgttctaccataccgctgtctttctcttctcctccctcttccacatggggctcagactaccagtttggaaggctcacccagtgctggattatctggtaggaagaataagttcatgctgagggctgtagcaaagcaggggcattaaaaaaggaaaaaaaaaaaaaaggaagaagactgtacccaagcttcgtaagaaaaatgccatccagggtggacttacttccatgtgttttatgatttagtattgtttttattttgaattatgcatgaaggaggacactatcatctttttggtgctttgagtttctaagtatgttgatctggtgctgcctggatatctgtttttaacgaagttctgtgtgtgtttctaatgtacagccaggactaaaaattaatgctctggacttaaaatgatcaaattcttaaagggctctacagatctcaatgttagttaatattaagttgcaattattgccagagctggaagaatcatctttttattggggagaaaaaccaaagattcttagaggatagaagattgctcataacagggtcatttgtcctctggggacaagcccttgtggttgagaatcactgccagaatgaccatgagtactgatgaaagtgggttctgtgccatgtgtgtcagctctaagaagaaatcgagactcactggagcggagggagcacatttctcttggtaattgtgccgctagtgggaaaattgaggcttattcttgaattcatgctggaaagtatcttcagttataagtgtgtatcattcaaacagtcaactgtgggtctctttgaggtgaaaaagtcttcagaaagagttttctgttttgtttttacaaaccgcagacacatagttccttattcaaaattcaaaaattcagaaggctctgaaaaccaaaagattttgcaaaactttgaaacaaagacatttggcagcaaaatctgaactgaattgacatgaggctattcatggtcttttattctatttggtgtagataatttggctgtagcaaaagtactttatttggttgtggggtgctgctgcagatttccctggaggcatacaagctctatgtggtatatgaaccatattgtctttcttttttcttttcttttttttttttttagagacgatgtctcactctgtcatccaggctggagtggtgcgatctcagctcgctgcaacttttgcctcccaggttcaagcgattcttctgcctcagcctcccgagtagctgggactataggcgtgcaccaccacgcctggctaatttttatatttttagtagagacagggtttcaccgcatcggccaggctggtcttgaactcctgacctggtgatctgcccaccttggcctcccaaaatgctgggactacaggcatgagccactgcacccagcccatattgcctttcttaaatgtgaagtcctctattctgaaacatctagcctcagggttttaggtaagagattgtagagctgtatacctacaaaattctcaatgtattaaatttgcttctcaaattttagaaaaatcatagactataggagaaactctaagaaacaacagaattttcttccctctcagaccatactaatgtttcattttacagttagtgctggcaaattttttttgataaagagttcagagaaattggtgtcaacatatatgttgccacatgatgtgtatcagaaggatgacacttgagaacaaatatggaaacataagcacatcaaaattatttttatcccttttgtacattacatatctgctggatgaaaagattttaaaaattgacttctagtggggaaaaaattagaatagtaatgaaatatatataccaacatggtcctctatccactaagattataacaacactacaaagaagatttaattctttagcattattttaaacttgaagaaagatcaagcaacttccccagagattgactacaatgcctaaagtggtttaaatgccttgataaatgattttcaccaagagtagatttcagttcttggtatttgggttttgtttgtttttgtagaaaacatttatcttatggtaccagtttttctcttcacccacttttctcttttgccatcattttaagtcttccttctctatgcatcattttaacttttcttcttatggcacctctttaaatattaagttatctttgttaagtagatattatactattgcttggcaaactacaacctacaggccaaatcatctgttcttacaaagttttattggaacaaccacacccatttatttgcattggttatggctggttttgcactacagtggcagagttgggtaattgtgacaaagacaatacggccagcaaagcctgaacaatttactatcagaccctttacagaaaagttcattgatccctatattgtgtcatataattgatcttacagatgggacaaacagatatcagatgacttacccaaggtcctgtggtgagataggaactgaaattaggatccaacatcaccaacatccctctctatctctacttcttcctaaaaacaaggacattggtgttgaatgaatgcagccagtgttggcctcttggatttcttttagaaccttatacccttaaccccaaattttatgttctctccctatctatgttttacacctaactgtgatatggcatttcccatagtaacacccaaacctaagccagcccttagttaaaacatttttttcctggagaattcttacatatggtctaatattactatgacagttgactagcatatgtagcttttgaggtatacaaatgaggaaataaaaactttggatatgggacataaaacttgcctctatttccacagcacaatcaaaactaaaaatcaaatgcatggggttctaccataaacccttatagagttctactgatatcaggagtagaaaaaccatgcccaagatacatactttattataactggctagggacttgccaaagtagaaatgatatttttgagcatggcacatgacattatagagtagtaatgtaacaaatgagcaggtgttcaaagattgcaatttgaatggaaactataaaattttagcttcaccagaggatgctgctgcaaattagttaagcaagcacttattgatggtttaaattaagcagccactctggaacagggcacatttcctttccctgtggagtactgttagagaggcttaacctactttgacacttctgatcaaatcttcccacttcattcaattcacagtgattcatgctctcaaaaatagtaaaaacgaaaaaaaaaaaatagggcatgaactagaagattaacagcgttcttaactttttcaataaagatttcttggactatgcagtcagttgaataatctatcactgttactgaagtaggtagtagatttttttttttctttacgccaagataagggaatcatactcctgaagaattctggaatagttgtaaggtctatgggacatttgaatatatctggaattattggcagcaggaaacaagtgctttcttgtgaaaaagattcccatggttaaaactgagagacctggaaagcactcctttcgagttggcctcaaatgaacagaacagaaatcttgcatgactattattacaatccagatggtaaatggacaccattgaaaacactgtttagtaaaggccataaagactgagtacccatgacttagactggtgaataagaatatatttcccacacgacctaaaattaatgctcagttgccaccgaattatagtgcagctctttcagaagcactaatgatacttattttgtgtggaatggattaattttaatcattttttttggcaaaaataattcacttgggggcctttgttttagttgtacttactcatagaatagttaatggttgggagatccttatattcagcatagatctagtcttgtggcttccatccattgagcccaaatccttagggctatcggaataagaatgactctttgtgtatatagaagcctagctatgggagcactacctagcagaattgaaggctggcctcatgtcctaccatttatccagcaagcaagtaagtttcattttcaagttctcatcttattctacctaaaccatccctaatgagacaaaacttcaagtcatcccataatcctggtggcactccttaaacaaacaagttcatccatgttccttttaggatatggtgcactgatctgcaggaatgttccaggaatcaactaaggcagattaatgctttgacaattccatattttctactgcttttctaacagtagtaagtgtcccaacctattaaagcaattacttatgtaaagtaacatttccccattattgtaatttattaatcttgtaacttttacttatttaagaatatggttgagttattcttttcaccacttttgctaacagtaagggtaaatttgtatggtactgtagatttaaaaatccctttacttctcttggcctcagtttcttcatttgaaagtaagacctttggaccagatctgcctttttcacaaaaggagttgaagactggcctcatgtcctaaggatccctttagattttacaaatattgataaaatgaccagatgtagaattgttattttgaaaaggtgagatgtattgcttgcagaagttttttcctctttctcataatattcctaaagatgttaaatgtgtattcttaatcattagtgagtttcttttttaaaaccacagaacatttaacagcaccaccaccaacaaaatcaaaagagaaagtgtgggagattgttactagtccttgcatggagaaaagtctagatgtggagactgtaggtaactgagtcccaaaagagagcccctgaaagaactgtgggcaggaatggctgagtcgggagctaggtcattgctgtgaaaatgggatcctgctcttccttctcagatgcacaccctcagcagcaccttttagttgtctaaggaccagtgctgtgtgaggtggtcatggatcacaccatgcgcaacctgggctctccataagccatcacccactcagaagacttctctgctggtcagccctgtcatctgaaatgtgttggaatcattgctttggataatggaatgcaaatgttaactcttcagattaatttgcatggagtaaattacaaaatcagagaaaggtcattttaactaacatactaaagagctttacagtttataaatccatacttaatctttttaagtcttaatagcagccctatatggcaggtagtgattttccattttgtagatgaagaaacatgtttgtagaagtgatttacccaagttcatataggtaggaagtgcagtctcaggaactggttgaaatcacgttccttttctatcgcactatgccaccactttgtaagcacaccaacctgcagaaatggaccactttcaagctcaagggagcaagatagataaaattataactcatatggatgcagctctaaatgattttgattctagttatgcatgcatgcagatgcattctttattcttttgaaccccttcttgtgtgaggaaatgagaagacattctgtagttccttttggcttggacttctcagagttatcatccttctttcataggaatgtttcatattccctgggcttttatatcacctggtcttttctcgtattaaggctaggacatatattttcacagagtaaatgcaggttcctcatgtaccactaaaccagtgatctggctaaagcattgaatcccagttgggatgaacttatgctcacctttgtcttttagactgttaccaatcaaaggtaggtttacaccatggtacatccattagcatatttcagatgcaggtaaccgaaaactttcatttaattagcttaacaaataaagggatttattatctaacatattgaaaagtgacataacaagacatagatggcttcctgttttattaattcatcagcacaacactactatccaagaaggcagcatctttccatctttctggttttgccatcctcggcttggtgcctacttcatggtctctgaatggtcatgacagtttcagacaacacattttgaaaacaatgaacttgcagaagaaaagcttaactctgccacttttttttcccttgaagagcaaggaaacatttcccagaagtctccagtggacctcccttcaaatttcattgttcagaattggaaacacatcttctaaatctctcagtagtaaggcaaatggtattgctaggaatgacagagaaattaagatttacccctgaatcacatgagacaggagtggaaatccaaacaaaaatcaggtatcttccagtaataaaattaggcagaatagctactaggtgaacaacaaacacggcctgccacaattagcttcaacaattttcagaaattcacattcatgtactcacatatactagggaacattggactgtttcctccgatttactatcagcttggtcataatcagtaatagagatctgggatttgtagtcaagatgacattatcctttggattcttcactgtggttcaaacttaaagtaatagtagatgaacataaagtataaaaataaaaaagactcattagtgcccccaaacaggaaaaccatttgtatggaacagaaataaggagaaaaacgattaatgacagtatggaagactaaatatctaaaagcactcctcctacaaagcacctagaaatactagataaaacataacattctctgaaataaatagctgagctcaaagaatatgagaaaattccctctagggcaaagtgcaaagggaagttaaaactagatcaataaacatatgaggggatattactgcagcccagaatgatgaaggtttgccaattttattaaacaactttaataatctcaaggcttgggatttaatatccaggagattaggtcttggacccttgtaagttgaaaagtaggaacttagagacccacataaaatctataccctcctttaagataaaatgataggcaagaaaaaaatattcccattggcatagggaaattacaaagaaagttgttttggcctgggttctgaatgaaaataaagttctcccctgagaatgtgtaatcactgcctctaacacatgggtttgcaaattgaatccattcctatgtggtcctggagcatccaagcaaatgaattaatattaaaagaatctggagacagtgatatgcctgggaatctgataaaagcaaaatcaaacatcttatgaaggataaaccctcaacccaggttatacatgcctcccactgtttacccacatggaagatgaggaaacaaatcatcttgagcaacagtcagacgatttaaaactgttagaattacattgccaagaaattcagataagaactacccaataaaaatattaaatatgtatgattaaaaagaagaattaaagacaagacactatataaaaaagaagaggcagattttgataagaactaagtagattttttagaaattcaataatcattaaaataaaaagtgaaggccgggcacggtggctcacacctgtaatcccagcactttgggaggctgaggtgggtggatcatgaggtcaagagatggagaccatcctggccgacatggtgaaaccccatctctactaaaaatacaaaaattagccaggtgtggtggtgtgcacctgtagtcccagctactctggaggctgaggcaggagaattgcttgaacctgggaggtggaggctgcagtgagccgagatcgcgccactgcactccagcctgggagacagagtgagactccatctcaaaaaaaaaaaaaaaaaaaaaaaaaaaaagccagtggacagccacaaagtacattagacatagctgaagaaaggattaatggactagaacaatagaactgatcaatacatttcctggaacgcagcacagacagagatggaaatatgagagagaagttaagtgacatgaaggatagatgagtgtatcgaacgtactctaattcaagtcctataagaatagagaaaatggctgacatgattcagaacgatatgatttgatagatgcaagaaacaaaatgaacccagaacagaataaatacaaaacaaatttaaacctaagagacactggattgaaactatcgcatagcaatcaccaagagaaaaactgaaaaacaactaaaaagaacagagagattactgacaaagatcaacaattagactgagagaagagttcgtaacaatagcatccagggaacaacaggatatttacaaattattgagagaaaacaagctgtctatatagttgtctttaatcagctaaattatcattcaagaatgagggttaaataatcccattttcataaaaaaaagagaaacttttccactctcaaattctttctttaaaaactactgagggaagtccttcaggaaatagaactcagaaagaaggaattaaatatagaaatgaatggcaacaaagaaattggtaaaccgtagagttaaaatataatttaacaattgcacacgaagaagtttatcaaaactttgcaagacatttttaaaggaaattataaaattatattgaaataaagtttaaattttcttaaatatacagcaagttatataatgttcatgaatggcaagactcattaaaaagcaatcatattcaaatttatctataaattcaatgcaattttaatcaacatcctattaatatttttcatggaccttgacaggctatttcaaaaattcatgtggaagacgaaaaggccaaggattatcaaataactttaaggaataagatcaagtgtaggatatattttgccctcccagattttagaatttactaaaaaactgtcataagtgaaacaacgtgatattttcagagaaatagattagaagataaatggaacaaaagacagtaatgacagacccatgaatatatggaaacgcataataagaatagtaactatggcttacatggtttctgctatgtaagttttaggcattgttctaagcactttacatattctaattcatttatccttaaaggtgacattaaatttcagttaagtatagcagtattattcataataggcaaaaggaagaaacaacacatatgtatattaagatataagggaataaacaaattgtggtatatacatacaattgggtattattcagctatgaaaagcaacaaagtactatatgctataagatagatgaacctccaggacattatgctaagtggaagaagccataatcaaaagttcacatcttatatgattccttttatatgaaacatccaaaataggcaaactatagagacaaagagcagattagtggttgctagggactgggagagagggagcgattccttaaaagatacggggtgtttgcatgttctcacttataagtgggagctgaacaataagaatacatggacacggaggggaacaacacacactggggcctgtttggggagggtaggagtggggagaacatt

SEQ ID NO: 2306 - DNA, 3446 bp, Homo sapiens
acaaagttaatccaacaagatattgatgctctaaatgcagaattaatggagacttcaatgactgatatgtcaattcttagtttctttgaacatttccatatttctcctgtgaagttgcatttgagtttgtctttgggttccggaggtgaagaatcagacaaagaaaaacaggaaatgtttgcagttcattctgtcaacttgctgttgaaaagcataggtgctactctgactgatgtggatgaccttatattcaaacttgcttattatgaaattcgatatcagttctacaagagagatcagcttatatggagtgttgttaggcattacagtgaacagttcttgaaacagatgtatgtccttgtattggggttagatgtacttggaaacccatttggattaattagaggtctgtctgaaggagttgaagctttattctatgaacccttccagggtgctgttcaaggccctgaagaatttgcagaggggttagtgattggagtgagaagcctctttggacacacagtaggtggtgcagcaggagttgtatctcgaatcaccggttctgttgggaaaggtttggcagcaattacaatggacaaggaatatcagcaaaaaagaagagaagagttgagtcgacagcccagagattttggagacagcctggccagaggaggaaagggctttctgcgaggagttgttggtggagtgactggaataataacaaaacctgtggaaggtgccaaaaaggaaggagctgctggattctttaaaggaattggaaaagggcttgtgggtgctgtggcccgtccaactggtggaatcgtagatatggccagtagtaccttccaaggcattcagagggcagcagaatcaactgaggaagtatctagcctccgtccccctcgcctgatccatgaagatggcatcattcgtccttatgacagacaggaatctgagggctctgacttacttgagaatcatatcaaaaagttggaaggagagacttaccgataccactgtgctattcctggaagcaagaagacaatccttatggttacaaataggcgagtgttgtgtataaaggaagttgaaatcctgggccttatgtgtgtagactggcaatgtccatttgaagattttgtatttcctcctagtgtcagtgaaaatgtgctaaaaatttcagttaaggaacagggtctgttccacaaaaaagacagtgccaatcaaggctgtgttcgaaaagtttacctgaaggacaccgccacagcagagagagcatgtaatgccattgaggatgcacagtcaacgagacagcagcaaaaattgatgaagcagtcatcagtgagacttctcagaccccaattgccatcttaatcacagacctcaggggctccaacagggagaaaaaacaatcactggtcttgtctataagtcactctgctttatcttgctaaagacaatttttcaagcaatcctttagttttagttttctggaatagctagtattgggttttctagttttttcaccttttagtttttactctaattttgtaaccatgtatatgctagcagtccacttctacgccaccacccaaatgggtcagacccttgaagaaacgtcacttcaaactcagaatgaaattttcattaatattaaaattgtgaagcaaaggtcaataggcttatatttaattaaagccttactgaagaataagaaatgagcttagaatgactagtgttctttgaaaggtttttttatttttgtttttttggggtttttttttttttttgagaccgagtcttgctctgtcgcccaggctggaatgcagtggtgcgatcttggctcactgcaatctctgcctctcgggttcaagctgttctactgcctcagcctcctgagtagctaggattacaggtgtgtgccaccacgcctgggtaatttttttttttttgtatttttagtagagatgagtttcaccatgttggtcagtctagtctcgaactcctgaccttgtgatccgcatgcctcagcctcccaaagtgctgggattacaggcatgagccaccacggcccgccaaaaggctttaacccatgaacaaatgttggatcctgacattttgtttaagagtgatttgttcaataattgaactgagttaacattcttggtaaaccaggtaattgaatgaagaaaggtcactaaagggagaaatgacatgttttctattttcttttcatgaaaacactgtttttccccctaataaagcatattttactttggtgcttatttttcctccttgcagtctaataaaaaaatctggacaatcaaaccttaaaatagctacactctgccctctgtaatgtagcattcataaaaatttggaagtatttacatcctctttcaagatgagcttatatgacacaattattatttgctgatacatgaaaatactgcactttaagtttctcaagactctgaaatatgtaaaattcaatatttttatattcccagaaattgtttcttacaggttgaaagtcttttaagggcatcacaaattaacatttactcctaatgcacgcctagaatgtattttaaatacttactaagaagaatgaaaattctttggttgttttatatataaataaggcatatataatgacactgtgttctgtgagggagcaggccctgtgagaatcaattcaggacagtatttttttttgtcctttctccatccttgatcagagataaactattaaaactttaaaaaatactcaaaaatatgtaagttttttggttgaacctttagatttgctcataatgtttaacataacaacatttatttcaaatcactgaattcatggagatgtggacacgcttggtttgctctatttttgtttatgtgtgatagtggttctgtcatcatcattcatgttttttaaggcctggtcataaaactttaaattttactagtgttacttaatgtatattctaaaaagagaatgcagtaactaatgccctaaatgtttgatctctgtttgtcattactttttcaaaattatttttttctgtaaagtataatatataaaacttcttgcttaaattgaatttctatattagtggttaattgcagtttattaaagggatcattatcagtaatttcatagcaactgttctagtgttttgtgtttttaaaacagaattaggaatttgagatatctgattatatttttcatatgaatcacagctgttgacaatgtcccatatatttaagaaattatatcatactgatactatttgtaacattttgatttgatttaatctccagggacagaaataattcattggtaaagtgtaataatgcgttttttaaaaatgctttgagaggtaattacttgcatatgagagaaataaaacatttggcacattgtttacaggtgtgaaaacttt

SEQ ID NO: 2307 - protein, 434 aa, Homo sapiens
MSMTDMSILSFFEHFHPVKLHLSLSLGSGGEESDKEKQEMFAVHSVNLLLKSIGATLTDVDDLIFKLAYYEIRYQFYKRDQLIWSVVRHYSEQFLKQMYVLVLGLDVLGNPFGLIRGLSEGVEALFYEPFQGAVQGPEEFAEGLVIGVRSLFGHTVGGAAGVVSRITGSVGKGLAAITMDKEYQQKRREELSRQPRDFGDSLRGKGFLRGVVGGVTGIITKPVEGAKKEGAAGFFKGIGKGLVGAVARPTGGIVDMASSTFQGIQRAAESTEEVSSLRPPRLIHEDGIIRPYDRQESEGSDLLENHIKKLEGEYYHCAIPGSKKTILMVTNRRVLCIKEVEILGLMCVDWQCPFEDFVFPPSVSENVLKISVKEQGLFHKKDSANQGCVRKVYLKDTATAERACNAIEDAQSTRQQQKLMKQSSVRLLRPQLPS

SEQ ID NO: 2308 - DNA, 4532 bp, Homo sapiens
cagcgctggtcgcagccctcagctgcgccgggcggttccggctcctccctctccttgtgcctcagcgccaccatggtgctggagtcggtggtcgcggacttgctgaaccgcttcctgggggactatgtggagaacctgaacaagtcccagctgaagctgggcatctggggcggaaatgtggctttagataatctacagataaaagaaaatgccctgagtgaattggatgttccttttaaagtcaaggctggccaaattgataaattaactttgaagattccttggaagaacctttatggagaagcagttgttgcgaccctggaaggattatacctgcttgttgtccctggagcaagtattaagtatgatgctgtaaaagaagaaaaatccttgcaggatgttaaacagaaagagctatcccgaattgaagaagcccttcaaaaagcagcagaaaaaggcacacattcaggggagttcatatatggcttggagaactttgtttacaaggacatcaagcctggacgtaaacgtaaaaagcacaaaaaacattttaagaaaccttttaaaggtcttgatcgttcaaaagataagccaaaagaagccaaaaaggatacatttgtggaaaaattggcaactcaagtaataaaaaatgtacaagtaaaaatcacagatattcacattaaatatgaagatgatgtcactgatccaaagcggcctctttcatttggtgtcacactgggagagcttagtctactgactgcaaatgaacactggactccatgcatattaaatgaagcagacaaaattatatacaagcttatacgacttgatagtcttagcgcctactggaatgtaaattgcagcatgtcttaccagagatcaagggaacagattttggatcagctgaaaaatgaaattcttacaagtggaaatatacccccaaattatcaatacattttccagccaatatcagcctctgcaaaactctacatgaatccttatgcagaatcagagctcaaaacgcccaaactggattgcaacatagaaatacaaaatattgccattgaactgaccaaacctcaggtattacttaagtatgattgaccttttggagtcagtggattatatggttaggaatgcgccttataggaaatacaagccttatttaccacttcataccaatggtcgacgatggtggaaatatgcaattgattctgttcttgaagttcatataagaaggtatacacagatgtggtcatggagtaacataaaaaagcacaggcagttactcaagagttataaaattgcctacaaaaacaagttaacacagtctaaagtctcagaagaaatacagaaagaaattcaggacttggagaagactctagatgtttttaacataattttagcaaggcaacaagcacaagttgaggtgattcggtctgggcaaaaattaaggaaaaagtctgctgacacaggcgagaaacgtggaggctggtttagtgggttgtggggtaagaaagagtctaagaaaaaggacgaagaatcattgattcctgaaactattgatgaccttatgactccagaggaaaaagataaactcttcactgccattggttatagtgagagtacccacaacctaactttacctaagcagtatgttgcccatattatgaccctgaagttagtaagcacctctgttacgataagagaaaacaagaatattccagaaatactaaaaattcagataattggcctgggcactcaagtatctcagcgaccaggagcacaagcacttaaggtagaagcgaaattagaacactggtatataacaggtttgagacagcaggatattgtgccatcacttgtggcttcaattggtgacactacatcatccttgcttaaaattaaatttgaaaccaatccggaggatagtcctgctgaccagactctgattgttcagtcccagcctgtggaggtcatctatgatgctaaaactgtcaatgcagtggttgaattctttcaatcaaataagggattggatcttgagcaaataacatcagcaacattgatgaagctggaagaaattaaggagagaacagctacaggacttacacatattattgaaactcgaaaagtccttgatttaaggataaatctgaagccttcttatctagtagttccacagacgggtttccaccatgaaaagtcagatcttctgattttagattttggtacatttcagctcaacagtaaagatcaaggtttacagaagactactaattcatctctggaagaaataatggataaggcatatgacaagtttgatgttgaaataaaaaatgtacaactactttttgcaagagcagaggaaacctggaaaaagtgtcgatttcagcatccatcaactatgcatatattgcaacccatggatattcatgttgagttggctaaggccatggtagaaaaagacattagaatggccagatttaaagtgtcaggaggacttcctttgatgcatgtgagaatttctgaccagaagatgaaagatgtgctatatttgatgaacagtatacctttgccacagaaatcatcagcccagtctccagagagacaggtatcctcaattcctattatttcaggtggtacaaaaggtctacttggtacttcactattgctagacactgtggaatcagagtctgatgatgagtattttgatgctgaagatggagaaccacagacttgtaaaagtatgaaaggatcagaacttaaaaaagctgcagaggtcccaaatgaggagctcatcaatcttctactcaagtttgaaattaaagaagtgattttggaatttactaaacagcagaaagaagaagatacaattctagtatttaatgttactcagttaggaacagaggccacaatgagaacatttgacttaactgtggtatcttatttaaagaaaatcagcttggattatcatgaaattgaaggatccaaaaggaagccccttcacttgattagctcttctgacaaacctggattagatcttttgaaagtggagtatattaaggctgataagaatggacctagttttcaaactgcttttggaaaaactgaacaaacagttaaggtggccttttcatctttaaatctgttgctgcaaacacaagctcttgtcgcttctattaattacctcacaaccattattccatctgatgatcaaagcataagtgttgctaaggaggtacaaatttcaactgaaaaacaacaaaaaaattcaactctgccaaaagcgattgtatcctccagagatagtgacattattgatttcaggctatttgccaagttgaatgctttctgtgtcattgtttgcaacgaaaagaacaatatcgccgaaatcaagattcaaggactggattcctccctttctctccagtcaagaaagcagtcactttttgcccgactagaaaatattattgtcacagatgttgatccaaagacagttcataagaaagctgtgtcaataatgggaaatgaagttttccgttttaatttggatttgtatccagatgctactgagggggatttgtatactgacatgtccaaagtggatggtgtgctgtctctgaatgttggctgtattcagattgtctatcttcataaattccttatgtcacttctgaacttcctgaataatttccagacagccaaagagtctctgagtgctgccactgcccaggctgcagaaagggctgccacaagtgtgaaagatcttgcccagaggagttttcgtgtttccatcaatattgatttgaaagcaccggttatagtcatcccacagtcttctatttccaccaatgcagtagtggtagatcttgggttaatcagagttcataatcagttcagtctggtgtctgatgaagactacttaaatcctccagtaattgatagaatggatgtgcagctaacaaagcttacactttataggacagtgatccagccaggcatctaccatcctgatattcagctgttgcacccaattaacttggaatttcttgtaaatcggaatctagctgcatcttggtaccacaaggtgcctgttgtggaaattaaaggacatcttgattcaatgaatgttagtctaaatcaagaagatcttaatcttttatttaggatactaacagaaaatctctgtgagggtactgaagacttggataaagtgaaaccaagagtacaagagacaggtgaaattaaagagccccttgaaatctctatatcacaagatgtacatgattcaaaaaatactttaacaactggagtggaagaaattaggtctgtagacatcattaatatgctgctgaattttgaaattaaagaggttgtggttactttgatgaaaaaatcagaaaagaaaggaaggcctttacatgagctaaatgtcctgcaacttggaatggaagctaaagttaaaacctatgacatgactgctaaagcttatctaaaaaaaattagtatgcagtgctttgatttcactg

SEQ ID NO: 2309 - protein, 1144 aa, Homo sapiens
  VARIANT (1)...(1144): Xaa = Any Amino Acid
MIDLLESVDYMVRNAPYRKYKPYLPLHTNGRRWWKYAIDSVLEVHIRRYTQMWSWSNIKKHRQLLKSYKIAYKNKLTQSKVSEEIQKEIQDLEKTLDVFNIILARQQAQVEVIRSGQKLRKKSADTGEKRGGWFSGLWGKKESKKKDEESLIPETIDDLMTPEEKDKLFTAIGYSESTHNLTLPKQYVAHIMTLKLVSTSVTIRENKNIPEILKIQIIGLGTQVSQRPGAQALKVEAKLEHWYITGLRQQDIVPSLVASIGDTTSSLLKIKFETNPEDSPADQTLIVQSQPVEVIYDAKTVNAVVEFFQSNKGLDLEQITSATLMKLEEIKERTATGLTHIIETRKVLDLRINLKPSYLVVPQTGFHHEKSDLLILDFGTFQLNSKDQGLQKTTNSSLEEIMDKAYDKFDVEIKNVQLLFARAEETWKKCRFQHPSTMHILQPMDIHVELAKAMVEKDIRMARFKVSGGLPLMHVRISDQKMKDVLYLMNSIPLPQKSSAQSPERQVSSIPIISGGTKGLLGTSLLLDTVESESDDEYFDAEDGEPQTCKSMKGSELKKAAEVPNEELINLLLKFEIKEVIFTKQQKEEDTILVFNVTQLGTEATMRTFDLTVVSYLKKISLDYHEIEGSKRKPLHLISSSDKPGLDLLKVEYIKADKNGPSFQTAFGKTEQTVKVAFSSLNLLLQTQALVASINYLTTIIPSDDQSISVAKEVQISTEKQQKNSTLPKAIVSSRDSDIIDFRLFAKLNAFCVIVCNEKNNIAEIKIQGLDSSLSLQSRKQSLFARLENIIVTDVDPKTVHKKAVSIMGNEVFRFNLDLYPDATEGDLYTDMSKVDGVLSLNVGCIQIVYLHKFLMSLLNFLNNFQTAKESLSAATAQAAERAATSVKDLAQRSFRVSINIDLKAPVIVIPQSSISTNAVVVDLGLIRVHNQFSLVSDEDYLNPPVIDRMDVQLTKLTLYRTVIQPGIYHPDIQLLHPINLEFLVNRNLAASWYHKVPVVEIKGHLDSMNVSLNQEDLNLLFRILTENLCEGTEDLDKVKPRVQETGEIKEPLEISISQDVHDSKNTLTTGVEEIRSVDIINMLLNFEIKEVVVTLMKKSEKKGRPLHELNVLQLGMEAKVKTYDMTAKAYLKKISMQCFDFTX

SEQ ID NO: 2310 - DNA, 5521 bp, Homo sapiens
ctaccacttatatttcctggaaggaagaacttcataggagcagggaagtcagatgcatgttgcagtgtccatcagtagaagtcagcttcttacctctcatagtgaatacagttgctctgcctgatgaattgagctacatatgtacacatggggaagactgggatgtagcttacattattcatctttatccttctctcactttgcggaatcttctcccatattccctaagatatttacttgagggaacagcagaaactcatgagctggcagaaggcagtactgctgatgttctgcattcgagaatcagtggtgaaataatggaattagtcctggtgaaataccagggcaaaaactggaatggacatttccgcatacgtgatacactaccagaattctttcctgtgtgtttttcttctgactccacagaagtgacgacagtcgacctgtcagtccacgtcaggagaattggcagccggatggtgctgtctgtctttagtccctattggttaatcaacaagactacccgggttctccagtatcgttcagaagatattcatgtgaaacatccagctgatttcagggatattattttattttctttcaagaagaagaacatttttactaaaaataaggtacaattaaaaatttcaaccagtgcctggtccagtagtttctcattggatacagtgggaagttatgggtgtgtgaagtgtcctgccaacaatatggagtacctggttggtgttagcatcaaaatgagcagtttcaacctttcacgaatagttaccctgactcccttttgtaccattgcaaacaagtcatcattagaactagaagttggcgagattgcatctgatggctcaatgccaactaataaatggaactatattgcttcttcagagtgccttccattttggccagaaaatttgtcaggcaaactttgtgtgagagtggtgggctgtgaaggatcttccaaaccattcttttataaccgacaggataatggcactttattgagcttagaagatctgaatgggggtatcttggtggatgtaaacactgccgaacattcaactgtcataactttttctgattaccatgagggatctgcacctgccttgataatgaaccatacaccatgggacatcctcacatacaaacagagtgggtcaccagaagaaatggtcttgctgccaagacaggctcgactttttgcctgggcagatcctactggtaccagaaaacttacatggacatatgcagcaaatgttggggaacatgatctgttaaaggatggatgtggacagtttccatatgatgcaaacatccagatacactgggtatcatttctggatgggcgccagagagttttgcttttcaccgatgatgttgccttggtttccaaagcactgcaggcagaagaaatggaacaggctgattatgaaataaccttgtctctccacagtcttgggctttcactggttaacaatgaaagcaagcaggaagtttcctatattgggataaccagttctggtgttgtttgggaggtgaaaccaaagcagaaatggaagccatttagtcaaaagcagataatcttattggaacaatcctatcagaaacatcaaatatcaagagaccatggctggattaagctagataataattttgaggtcaattttgataaagatccaatggaaatgcgcctccctattcgtagccctattaaacgagactttttatcaggaattcagattgaatttaagcagtcttctcaccagagaagtttaagggccaggttgtactggcttcaggttgataatcagttaccaggtgcaatgttccctgttgtatttcatcctgttgcccctccaaaatctattgctttagattcagagcccaagcctttcattgatgtgagtgtcatcacaagatttaatgagtacagtaaagtcttacagttcaagtattttatggtcctcattcaggaaatggccttaaaaattgatcaagggtttctaggagctattattgcactgtttaccccaacaacagaccctgaagctgaaagaagacggacaaagttaatccaacaagatattgatgctctaaatgcagaattaatggagacttcaatgactgatatgtcaattcttagtttctttgaacatttccatatttctcctgtgaagttgcatttgagtttgtctttgggttccggaggtgaagaatcagacaaagaaaaacaggaaatgtttgcagttcattctgtcaacttgctgttgaaaagcataggtgctactctgactgatgtggatgaccttatattcaaacttgcttattatgaaattcgatatcagttctacaagagagatcagcttatatggagtgttgttaggcattacagtgaacagttcttgaaacagatgtatgtccttgtattggggttagatgtacttggaaacccatttggattaattagaggtctgtctgaaggagttgaagctttattctatgaacccttccagggtgctgttcaaggccctgaagaatttgcagaggggttagtgattggagtgagaagcctctttggacacacagtaggtggtgcagcaggagttgtatctcgaatcaccggttctgttgggaaaggtttggcagcaattacaatggacaaggaatatcagcaaaaaagaagagaagagttgagtcgacagcccagagattttggagacagcctggccagaggaggaaagggctttctgcgaggagttgttggtggagtgactggaataataacaaaacctgtggaaggtgccaaaaaggaaggagctgctggattctttaaaggaattggaaaagggcttgtgggtgctgtggcccgtccaactggtggaatcgtagatatggccagtagtaccttccaaggcattcagagggcagcagaatcaactgaggaagtatctagcctccgtccccctcgcctgatccatgaagatggcatcattcgtccttatgacagacaggaatctgagggctctgacttacttgagaatcatatcaaaaagttggaaggagagacttaccgataccactgtgctattcctggaagcaagaagacaatccttatggttacaaataggcgagtgttgtgtataaaggaagttgaaatcctgggccttatgtgtgtagactggcaatgtccatttgaagattttgtatttcctcctagtgtcagtgaaaatgtgctaaaaatttcagttaaggaacagggtctgttccacaaaaaagacagtgccaatcaaggctgtgttcgaaaagtttacctgaaggacaccgccacagcagagagagcatgtaatgccattgaggatgcacagtcaacgagacagcagcaaaaattgatgaagcagtcatcagtgagacttctcagaccccaattgccatcttaatcacagacctcaggggctccaacagggagaaaaaacaatcactggtcttgtctataagtcactctgctttatcttgctaaagacaatttttcaagcaatcctttagttttagttttctggaatagctagtattgggttttctagttttttcaccttttagtttttactctaattttgtaaccatgtatatgctagcagtccacttctacgccaccacccaaatgggtcagacccttgaagaaacgtcacttcaaactcagaatgaaattttcattaatattaaaattgtgaagcaaaggtcaataggcttatatttaattaaagccttactgaagaataagaaatgagcttagaatgactagtgttctttgaaaggtttttttatttttgtttttttggggtttttttttttttttgagaccgagtcttgctctgtcgcccaggctggaatgcagtggtgcgatcttggctcactgcaatctctgcctctcgggttcaagctgttctactgcctcagcctcctgagtagctaggattacaggtgtgtgccaccacgcctgggtaatttttttttttttgtatttttagtagagatgagtttcaccatgttggtcagtctagtctcgaactcctgaccttgtgatccgcatgcctcagcctcccaaagtgctgggattacaggcatgagccaccacggcccgccaaaaggctttaacccatgaacaaatgttggatcctgacattttgtttaagagtgatttgttcaataattgaactgagttaacattcttggtaaaccaggtaattgaatgaagaaaggtcactaaagggagaaatgacatgttttctattttcttttcatgaaaacactgtttttccccctaataaagcatattttactttggtgcttatttttcctccttgcagtctaataaaaaaatctggacaatcaaaccttaaaatagctacactctgccctctgtaatgtagcattcataaaaatttggaagtatttacatcctctttcaagatgagcttatatgacacaattattatttgctgatacatgaaaatactgcactttaagtttctcaagactctgaaatatgtaaaattcaatatttttatattcccagaaattgtttcttacaggttgaaagtcttttaagggcatcacaaattaacatttactcctaatgcacgcctagaatgtattttaaatacttactaagaagaatgaaaattctttggttgttttatatataaataaggcatatataatgacactgtgttctgtgagggagcaggccctgtgagaatcaattcaggacagtatttttttttgtcctttctccatccttgatcagagataaactattaaaactttaaaaaatactcaaaaatatgtaagttttttggttgaacctttagatttgctcataatgtttaacataacaacatttatttcaaatcactgaattcatggagatgtggacacgcttggtttgctctatttttgtttatgtgtgatagtggttctgtcatcatcattcatgttttttaaggcctggtcataaaactttaaattttactagtgttacttaatgtatattctaaaaagagaatgcagtaactaatgccctaaatgtttgatctctgtttgtcattactttttcaaaattatttttttctgtaaagtataatatataaaacttcttgcttaaattgaatttctatattagtggttaattgcagtttattaaagggatcattatcagtaatttcatagcaactgttctagtgttttgtgtttttaaaacagaattaggaatttgagatatctgattatatttttcatatgaatcacagctgttgacaatgtcccatatatttaagaaattatatcatactgatactatttgtaacattttgatttgatttaatctccagggacagaaataattcattggtaaagtgtaataatgcgttttttaaaaatgctttgagaggtaattacttgcatatgagagaaataaaacatttggcacattgtttacaggtgtgaaaacttt

SEQ ID NO: 2311 - protein, 1118 aa, Homo sapiens
MLQCPSVEVSFLPLIVNTVPDELSYICTHGEDWDVAYIIHLYPSLTLRNLLPYSLRYLLEGTAETHELAEGSTADVLHSRISGEIMELVLVKYQGKNWNGHFRIRDTLPEFFPVCFSSDSTEVTTVDLSVHVRRIGSRMVLSVFSPYWLINKTTRVLQYRSEDIHVKHPADFRDIILFSFKKKNIFTKNKVQLKISTSAWSSSFSLDTVGSYGCVKCPANNMEYLVGVSIKMSSFNLSRIVTLTPFCTIANKSSLELEVGEIASDGSMPTNKWNYIASSECLPFWPENLSGKLCVRVVGCEGSSKPFFYNRQDNGTLLSLEDLNGGILVDVNTAEHSTVITFSDYHEGSAPALIMNHTPWDILTYKQSGSPEEMVLLPRQARLFAWADPTGTRKLTWTYAANVGEHDLLKDGCGQFPYDANIQIHWVSFLDGRQRVLLFTDDVVSKALQAEEMEQADYEITLSLHSLGLSLVNNESKQEVSYIGITSSGVVWEVKPKQKWKPFSQKQIILLEQSYQKHQISRDHGWIKLDNNFEVNFDKDPMEMRLPIRSPIKRDFLSGIQIEFKQSSHQRSLRARLYWLQVDNQLPGAMFPVVFHPVAPPKSIALDSEPKPFIDVSVITRFNEYSKVLQFKYFMVLIQEMALKIDQGFLGAIIALFTPTTDPEAERRRTKLIQQDIDALNAELMSMTDMSILSFFEHFHPVKLHLSLSLGSGGEESDKEKQEMFAVHSVNLLLKSIGATLTDVDDLIFKLAYYEIRYQFYKRDQLIWSVVRHYSEQFLKQMYVLVLGLDVLGNPFGLIRGLSEGVEALFYEPFQGAVQGPEEFAEGLVIGVRSLFGHTVGGAAGVVSRITGSVGKGLAAITMDKEYQQKRREELSRQPRDFGDSLRGKGFLRGVVGGVTGIITKPVEGAKKEGAAGFFKGIGKGLVGAVARPTGGIVDMASSTFQGIQRAAESTEEVSSLRPPRLIHEDGIIRPYDRQESEGSDLLENHIKKLEGEYYHCAIPGSKKTILMVTNRRVLCIKEVEILGLMCVDWQCPFEDFVFPPSVSENVLKISVKEQGLFHKKDSANQGCVRKVYLKDTATAERACNAIEDAQSTRQQQKLMKQSSVRLLRPQLPS

SEQ ID NO: 2312 - DNA, 1913 bp, Homo sapiens
ctaccacttatatttcctggaaggaagaacttcataggagcagggaagtcagatgcatgttgcagtgtccatcagtagaagtcagcttcttacctctcatagtgaatacagttgctctgcctgatgaattgagctacatatgtacacatggggaagactgggatgtagcttacattattcatctttatccttctctcactttgcggaatcttctcccatattccctaagatatttacttgagggaacagcagaaactcatgagctggcagaaggcagtactgctgatgttctgcattcgagaatcagtggtgaaataatggaattagtcctggtgaaataccagggcaaaaactggaatggacatttccgcatacgtgatacactaccagaattctttcctgtgtgtttttcttctgactccacagaagtgacgacagtcgacctgtcagtccacgtcaggagaattggcagccggatggtgctgtctgtctttagtccctattggttaatcaacaagactacccgggttctccagtatcgttcagaagatattcatgtgaaacatccagctgatttcagggatattattttattttctttcaagaagaagaacatttttactaaaaataaggtacaattaaaaatttcaaccagtgcctggtccagtagtttctcattggatacagtgggaagttatgggtgtgtgaagtgtcctgccaacaatatggagtacctggttggtgttagcatcaaaatgagcagtttcaacctttcacgaatagttaccctgactcccttttgtaccattgcaaacaagtcatcattagaactagaagttggcgagattgcatctgatggctcaatgccaactaataaatggaactatattgcttcttcagagtgccttccattttggccagaaaatttgtcaggcaaactttgtgtgagagtggtgggctgtgaaggatcttccaaaccattcttttataaccgacaggataatggcactttattgagcttagaagatctgaatgggggtatcttggtggatgtaaacactgccgaacattcaactgtcataactttttctgattaccatgagggatctgcacctgccttgataatgaaccatacaccatgggacatcctcacatacaaacagagtgggtcaccagaagaaatggtcttgctgccaagacaggctcgactttttgcctgggcagatcctactggtaccagaaaacttacatggacatatgcagcaaatgttggggaacatgatctgttaaaggtatcttttgatgtgaatgagtgctatatgagttacctgacagtgaaggaagtagagaagctatcttcactgactccttgtcctaattgaactaaaagtgaattggaagtatttccagaataagtagcttttggactttagatggcaaatactgtagttcaaaccagtatattaccttagctctatcaaagtaatttatttacaatttaaaaaatagacctgctttatcttgcctatgtaaagcacctttttaattaatttacctattttaaaaggaaggaattgtaagactaagttaaaaacaactttattttgaacatacctatgccacttttggctatgagtttttaaagcttgttttcctaagcacagctatgtattttgttaattaatgaagtctgatagtatgcaaattatcgcatgtaagaaatttagtgaaatatttatcgaaacaatatttaggtagctgagttgattaaatatgttattttttagactcttagcctctgaaagggcccaaagaattcatataccatcctcccatctgatataggaattgctcctgcattagtaatatatcatccagtttctgtatgaataaaatccatgatgaaagagttt

SEQ ID NO: 2313 - protein, 439 aa, Homo sapiens
MLQCPSVEVSFLPLIVNTVPDELSYICTHGEDWDVAYIIHLYPSLTLRNLLPYSLRYLLEGTAETHELAEGSTADVLHSRISGEIMELVLVKYQGKNWNGHFRIRDTLPEFFPVCFSSDSTEVTTVDLSVHVRRIGSRMVLSVFSPYWLINKTTRVLQYRSEDIHVKHPADFRDIILFSFKKKNIFTKNKVQLKISTSAWSSSFSLDTVGSYGCVKCPANNMEYLVGVSIKMSSFNLSRIVTLTPFCTIANKSSLELEVGEIASDGSMPTNKWNYIASSECLPFWPENLSGKLCVRVVGCEGSSKPFFYNRQDNGTLLSLEDLNGGILVDVNTAEHSTVITFSDYHEGSAPALIMNHTPWDILTYKQSGSPEEMVLLPRQARLFAWADPTGTRKLTWTYAANVGEHDLLKVSFDVNECYMSYLTVKEVEKLSSLTPCPN

SEQ ID NO: 2314 - DNA, 8451 bp, Homo sapiens
cagcgctggtcgcagccctcagctgcgccgggcggttccggctcctccctctccttgtgcctcagcgccaccatggtgctggagtcggtggtcgcggacttgctgaaccgcttcctgggggactatgtggagaacctgaacaagtcccagctgaagctgggcatctggggcggaaatgtggctttagataatctacagataaaagaaaatgccctgagtgaattggatgttccttttaaagtcaaggctggccaaattgataaattaactttgaagattccttggaagaacctttatggagaagcagttgttgcgaccctggaaggattatacctgcttgttgtccctggagcaagtattaagtatgatgctgtaaaagaagaaaaatccttgcaggatgttaaacagaaagagctatcccgaattgaagaagcccttcaaaaagcagcagaaaaagataagccaaaagaagccaaaaaggatacatttgtggaaaaattggcaactcaagtaataaaaaatgtacaagtaaaaatcacagatattcacattaaatatgaagatgatgtcactgatccaaagcggcctctttcatttggtgtcacactgggagagcttagtctactgactgcaaatgaacactggactccatgcatattaaatgaagcagacaaaattatatacaagcttatacgacttgatagtcttagcgcctactggaatgtaaattgcagcatgtcttaccagagatcaagggaacagattttggatcagctgaaaaatgaaattcttacaagtggaaatatacccccaaattatcaatacattttccagccaatatcagcctctgcaaaactctacatgaatccttatgcagaatcagagctcaaaacgcccaaactggattgcaacatagaaatacaaaatattgccattgaactgaccaaacctcaggtattacttaagtatgattgaccttttggagtcagtggattatatggttaggaatgcgccttataggaaatacaagccttatttaccacttcataccaatggtcgacgatggtggaaatatgcaattgattctgttcttgaagttcatataagaaggtatacacagatgtggtcatggagtaacataaaaaagcacaggcagttactcaagagttataaaattgcctacaaaaacaagttaacacagtctaaagtctcagaagaaatacagaaagaaattcaggacttggagaagactctagatgtttttaacataattttagcaaggcaacaagcacaagttgaggtgattcggtctgggcaaaaattaaggaaaaagtctgctgacacaggcgagaaacgtggaggctggtttagtgggttgtggggtaagaaagagtctaagaaaaaggacgaagaatcattgattcctgaaactattgatgaccttatgactccagaggaaaaagataaactcttcactgccattggttatagtgagagtacccacaacctaactttacctaagcagtatgttgcccatattatgaccctgaagttagtaagcacctctgttacgataagagaaaacaagaatattccagaaatactaaaaattcagataattggcctgggcactcaagtatctcagcgaccaggagcacaagcacttaaggtagaagcgaaattagaacactggtatataacaggtttgagacagcaggatattgtgccatcacttgtggcttcaattggtgacactacatcatccttgcttaaaattaaatttgaaaccaatccggaggatagtcctgctgaccagactctgattgttcagtcccagcctgtggaggtcatctatgatgctaaaactgtcaatgcagtggttgaattctttcaatcaaataagggattggatcttgagcaaataacatcagcaacattgatgaagctggaagaaattaaggagagaacagctacaggacttacacatattattgaaactcgaaaagtccttgatttaaggataaatctgaagccttcttatctagtagttccacagacgggtttccaccatgaaaagtcagatcttctgattttagattttggtacatttcagctcaacagtaaagatcaaggtttacagaagactactaattcatctctggaagaaataatggataaggcatatgacaagtttgatgttgaaataaaaaatgtacaactactttttgcaagagcagaggaaacctggaaaaagtgtcgatttcagcatccatcaactatgcatatattgcaacccatggatattcatgttgagttggctaaggccatggtagaaaaagacattagaatggccagatttaaagtgtcaggaggacttcctttgatgcatgtgagaatttctgaccagaagatgaaagatgtgctatatttgatgaacagtatacctttgccacagaaatcatcagcccagtctccagagagacaggtaaatagatacaataaaatgtataaccctatttttattgtctctattttgggagatgaagtctttaggttccaactgactctttatccagatgccacagaaggagaggcctatgctgatatgtccaaagtagacggcaaacttagttttaaagtgggttgtattcagattgtttatgttcataaattcttcatgtctcttttgaacttcctcaacaatttccaaactgctaaagaagctttgagtacagccacagtccaggctgcagaaagagctgcttccagcatgaaagacttggctcaaaagagtttccgccttttgatggatattaatttgaaagcaccagttattattattcctcagtcttcagtatcacctaatgctgttatagcagatctgggtttaatcagagttgaaaacaagtttagcttggttcctatggaacattattctcttcctccagtcattgataaaatgaacatcgaactcactcagttgaagctgtcaagaactattttgcaggctagcttgccacaaaatgacattgaaattttaaaaccagtcaacatgcttttgtccatacagcgaaacttagcagcagcatggtatgtgcaaattccagggatggagataaaaggaaaactaaaacctatgcaggttgctctcagtgaagatgacttgacagttttaatgaaaattttgctagaaaatcttggagaagcttcctcacaaccaagccctacacagtctgtgcaggagactgtaagagtgagactggtgaaataccagggcaaaaactggaatggacatttccgcatacgtgatacactaccagaattctttcctgtgtgtttttcttctgactccacagaagtgacgacagtcgacctgtcagtccacgtcaggagaattggcagccggatggtgctgtctgtctttagtccctattggttaatcaacaagactacccgggttctccagtatcgttcagaagatattcatgtgaaacatccagctgatttcagggatattattttattttctttcaagaagaagaacatttttactaaaaataaggtacaattaaaaatttcaaccagtgcctggtccagtagtttctcattggatacagtgggaagttatgggtgtgtgaagtgtcctgccaacaatatggagtacctggttggtgttagcatcaaaatgagcagtttcaacctttcacgaatagttaccctgactcccttttgtaccattgcaaacaagtcatcattagaactagaagttggcgagattgcatctgatggctcaatgccaactaataaatggaactatattgcttcttcagagtgccttccattttggccagaaaatttgtcaggcaaactttgtgtgagagtggtgggctgtgaaggatcttccaaaccattcttttataaccgacaggataatggcactttattgagcttagaagatctgaatgggggtatcttggtggatgtaaacactgccgaacattcaactgtcataactttttctgattaccatgagggatctgcacctgccttgataatgaaccatacaccatgggacatcctcacatacaaacagagtgggtcaccagaagaaatggtcttgctgccaagacaggctcgactttttgcctgggcagatcctactggtaccagaaaacttacatggacatatgcagcaaatgttggggaacatgatctgttaaaggatggatgtggacagtttccatatgatgcaaacatccagatacactgggtatcatttctggatgggcgccagagagttttgcttttcaccgatgatgttgccttggtttccaaagcactgcaggcagaagaaatggaacaggctgattatgaaataaccttgtctctccacagtcttgggctttcactggttaacaatgaaagcaagcaggaagtttcctatattgggataaccagttctggtgttgtttgggaggtgaaaccaaagcagaaatggaagccatttagtcaaaagcagataatcttattggaacaatcctatcagaaacatcaaatatcaagagaccatggctggattaagctagataataattttgaggtcaattttgataaagatccaatggaaatgcgcctccctattcgtagccctattaaacgagactttttatcaggaattcagattgaatttaagcagtcttctcaccagagaagtttaagggccaggttgtactggcttcaggttgataatcagttaccaggtgcaatgttccctgttgtatttcatcctgttgcccctccaaaatctattgctttagattcagagcccaagcctttcattgatgtgagtgtcatcacaagatttaatgagtacagtaaagtcttacagttcaagtattttatggtcctcattcaggaaatggccttaaaaattgatcaagggtttctaggagctattattgcactgtttaccccaacaacagaccctgaagctgaaagaagacggacaaagttaatccaacaagatattgatgctctaaatgcagaattaatggagacttcaatgactgatatgtcaattcttagtttctttgaacatttccatatttctcctgtgaagttgcatttgagtttgtctttgggttccggaggtgaagaatcagacaaagaaaaacaggaaatgtttgcagttcattctgtcaacttgctgttgaaaagcataggtgctactctgactgatgtggatgaccttatattcaaacttgcttattatgaaattcgatatcagttctacaagagagatcagcttatatggagtgttgttaggcattacagtgaacagttcttgaaacagatgtatgtccttgtattggggttagatgtacttggaaacccatttggattaattagaggtctgtctgaaggagttgaagctttattctatgaacccttccagggtgctgttcaaggccctgaagaatttgcagaggggttagtgattggagtgagaagcctctttggacacacagtaggtggtgcagcaggagttgtatctcgaatcaccggttctgttgggaaaggtttggcagcaattacaatggacaaggaatatcagcaaaaaagaagagaagagttgagtcgacagcccagagattttggagacagcctggccagaggaggaaagggctttctgcgaggagttgttggtggagtgactggaataataacaaaacctgtggaaggtgccaaaaaggaaggagctgctggattctttaaaggaattggaaaagggcttgtgggtgctgtggcccgtccaactggtggaatcgtagatatggccagtagtaccttccaaggcattcagagggcagcagaatcaactgaggaagtatctagcctccgtccccctcgcctgatccatgaagatggcatcattcgtccttatgacagacaggaatctgagggctctgacttacttgagaatcatatcaaaaagttggaaggagagacttaccgataccactgtgctattcctggaagcaagaagacaatccttatggttacaaataggcgagtgttgtgtataaaggaagttgaaatcctgggccttatgtgtgtagactggcaatgtccatttgaagattttgtatttcctcctagtgtcagtgaaaatgtgctaaaaatttcagttaaggaacagggtctgttccacaaaaaagacagtgccaatcaaggctgtgttcgaaaagtttacctgaaggacaccgccacagcagagagagcatgtaatgccattgaggatgcacagtcaacgagacagcagcaaaaattgatgaagcagtcatcagtgagacttctcagaccccaattgccatcttaatcacagacctcaggggctccaacagggagaaaaaacaatcactggtcttgtctataagtcactctgctttatcttgctaaagacaatttttcaagcaatcctttagttttagttttctggaatagctagtattgggttttctagttttttcaccttttagtttttactctaattttgtaaccatgtatatgctagcagtccacttctacgccaccacccaaatgggtcagacccttgaagaaacgtcacttcaaactcagaatgaaattttcattaatattaaaattgtgaagcaaaggtcaataggcttatatttaattaaagccttactgaagaataagaaatgagcttagaatgactagtgttctttgaaaggtttttttatttttgtttttttggggtttttttttttttttgagaccgagtcttgctctgtcgcccaggctggaatgcagtggtgcgatcttggctcactgcaatctctgcctctcgggttcaagctgttctactgcctcagcctcctgagtagctaggattacaggtgtgtgccaccacgcctgggtaatttttttttttttgtatttttagtagagatgagtttcaccatgttggtcagtctagtctcgaactcctgaccttgtgatccgcatgcctcagcctcccaaagtgctgggattacaggcatgagccaccacggcccgccaaaaggctttaacccatgaacaaatgttggatcctgacattttgtttaagagtgatttgttcaataattgaactgagttaacattcttggtaaaccaggtaattgaatgaagaaaggtcactaaagggagaaatgacatgttttctattttcttttcatgaaaacactgtttttccccctaataaagcatattttactttggtgcttatttttcctccttgcagtctaataaaaaaatctggacaatcaaaccttaaaatagctacactctgccctctgtaatgtagcattcataaaaatttggaagtatttacatcctctttcaagatgagcttatatgacacaattattatttgctgatacatgaaaatactgcactttaagtttctcaagactctgaaatatgtaaaattcaatatttttatattcccagaaattgtttcttacaggttgaaagtcttttaagggcatcacaaattaacatttactcctaatgcacgcctagaatgtattttaaatacttactaagaagaatgaaaattctttggttgttttatatataaataaggcatatataatgacactgtgttctgtgagggagcaggccctgtgagaatcaattcaggacagtatttttttttgtcctttctccatccttgatcagagataaactattaaaactttaaaaaatactcaaaaatatgtaagttttttggttgaacctttagatttgctcataatgtttaacataacaacatttatttcaaatcactgaattcatggagatgtggacacgcttggtttgctctatttttgtttatgtgtgatagtggttctgtcatcatcattcatgttttttaaggcctggtcataaaactttaaattttactagtgttacttaatgtatattctaaaaagagaatgcagtaactaatgccctaaatgtttgatctctgtttgtcattactttttcaaaattatttttttctgtaaagtataatatataaaacttcttgcttaaattgaatttctatattagtggttaattgcagtttattaaagggatcattatcagtaatttcatagcaactgttctagtgttttgtgtttttaaaacagaattaggaatttgagatatctgattatatttttcatatgaatcacagctgttgacaatgtcccatatatttaagaaattatatcatactgatactatttgtaacattttgatttgatttaatctccagggacagaaataattcattggtaaagtgtaataatgcgttttttaaaaatgctttgagaggtaattacttgcatatgagagaaataaaacatttggcacattgtttacaggtgtgaaaacttt

SEQ ID NO: 2315 - protein, 1791 aa, Homo sapiens
MIDLLESVDYMVRNAPYRKYKPYLPLHTNGRRWWKYAIDSVLEVHIRRYTQMWSWSNIKKHRQLLKSYKIAYKNKLTQSKVSEEIQKEIQDLEKTLDVFNIILARQQAQVEVIRSGQKLRKKSADTGEKRGGWFSGLWGKKESKKKDEESLIPETIDDLMTPEEKDKLFTAIGYSESTHNLTLPKQYVAHIMTLKLVSTSVTIRENKNIPEILKIQIIGLGTQVSQRPGAQALKVEAKLEHWYITGLRQQDIVPSLVASIGDTTSSLLKIKFETNPEDSPADQTLIVQSQPVEVIYDAKTVNAVVEFFQSNKGLDLEQITSATLMKLEEIKERTATGLTHIIETRKVLDLRINLKPSYLVVPQTGFHHEKSDLLILDFGTFQLNSKDQGLQKTTNSSLEEIMDKAYDKFDVEIKNVQLLFARAEETWKKCRFQHPSTMHILQPMDIHVELAKAMVEKDIRMARFKVSGGLPLMHVRISDQKMKDVLYLMNSIPLPQKSSAQSPERQVNRYNKMYNPIFIVSILGDEVFRFQLTLYPDATEGEAYADMSKVDGKLSFKVGCIQIVYVHKFFMSLLNFLNNFQTAKEALSTATVQAAERAASSMKDLAQKSFRLLMDINLKAPVIIIPQSSVSPNAVIADLGLIRVENKFSLVPMEHYSLPPVIDKMNIELTQLKLSRTILQASLPQNDIEILKPVNMLLSIQRNLAAAWYVQIPGMEIKGKLKPMQVSEDDLTVLMKILLENLGEASSQPSPTQSVQETVRVRLVKYQGKNWNGHFRIRDTLPEFFPVCFSSDSTEVTTVDLSVHVRRIGSRMVLSVFSPYWLINKTTRVLQYRSEDIHVKHPADFRDIILFSFKKKNIFTKNKVQLKISTSAWSSSFSLDTVGSYGCVKCPANNMEYLVGVSIKMSSFNLSRIVTLTPFCTIANKSSLELEVGEIASDGSMPTNKWNYIASSECLPFWPENLSGKLCVRVVGCEGSSKPFFYNRQDNGTLLSLEDLNGGILVDVNTAEHSTVITFSDYHEGSAPALIMNHTPWDILTYKQSGSPEEMVLLPRQARLFAWADPTGTRKLTWTYAANVGEHDLLKDGCGQFPYDANIQIHWVSFLDGRQRVLLFTDDVVSKALQAEEMEQADYEITLSLHSLGLSLVNNESKQEVSYIGITSSGVVWEVKPKQKWKPFSQKQIILLEQSYQKHQISRDHGWIKLDNNFEVNFDKDPMEMRLPIRSPIKRDFLSGIQIEFKQSSHQRSLRARLYWLQVDNQLPGAMFPVVFHPVAPPKSIALDSEPKPFIDVSVITRFNEYSKVLQFKYFMVLIQEMALKIDQGFLGAIIALFTPTTDPEAERRRTKLIQQDIDALNAELMSMTDMSILSFFEHFHPVKLHLSLSLGSGGEESDKEKQEMFAVHSVNLLLKSIGATLTDVDDLIFKLAYYEIRYQFYKRDQLIWSVVRHYSEQFLKQMYVLVLGLDVLGNPFGLIRGLSEGVEALFYEPFQGAVQGPEEFAEGLVIGVRSLFGHTVGGAAGVVSRITGSVGKGLAAITMDKEYQQKRREELSRQPRDFGDSLRGKGFLRGVVGGVTGIITKPVEGAKKEGAAGFFKGIGKGLVGAVARPTGGIVDMASSTFQGIQRAAESTEEVSSLRPPRLIHEDGIIRPYDRQESEGSDLLENHIKKLEGEYYHCAIPGSKKTILMVTNRRVLCIKEVEILGLMCVDWQCPFEDFVFPPSVSENVLKISVKEQGLFHKKDSANQGCVRKVYLKDTATAERACNAIEDAQSTRQQQKLMKQSSVRLLRPQLPS

SEQ ID NO: 2316 - DNA, 252 bp, Homo sapiens
atgtgttacttcttcctcttagagcccaagcctttcattgatgtgagtgtcatcacaagatttaatgagtacagtaaagtcttacagttcaagtattttatggtcctcattcaggaaatggccttaaaaattgatcaagggtttctaggagctattattgcactgtttaccccaacaacagaccctgaagctgaaagaagacgggtaaaaatttttatttcttggggaaaatataaaattaacaaaatttaa

SEQ ID NO: 2317 - protein, 83 aa, Homo sapiens
MCYFFLLEPKPFIDVSVITRFNEYSKVLQFKYFMVLIQEMALKIDQGFLGAIIALFTPTTDPEAERRRVKIFISWGKYKINKI

SEQ ID NO: 2318 - DNA, 4634 bp, Homo sapiens
cagcgctggtcgcagccctcagctgcgccgggcggttccggctcctccctctccttgtgcctcagcgccaccatggtgctggagtcggtggtcgcggacttgctgaaccgcttcctgggggactatgtggagaacctgaacaagtcccagctgaagctgggcatctggggcggaaatgtggctttagataatctacagataaaagaaaatgccctgagtgaattggatgttccttttaaagtcaaggctggccaaattgataaattaactttgaagattccttggaagaacctttatggagaagcagttgttgcgaccctggaaggattatacctgcttgttgtccctggagcaagtattaagtatgatgctgtaaaagaagaaaaatccttgcaggatgttaaacagaaagagctatcccgaattgaagaagcccttcaaaaagcagcagaaaaaggcacacattcaggggagttcatatatggcttggagaactttgtttacaaggacatcaagcctggacgtaaacgtaaaaagcacaaaaaacattttaagaaaccttttaaaggtcttgatcgttcaaaagataagccaaaagaagccaaaaaggatacatttgtggaaaaattggcaactcaagtaataaaaaatgtacaagtaaaaatcacagatattcacattaaatatgaagatgatgtcactgatccaaagcggcctctttcatttggtgtcacactgggagagcttagtctactgactgcaaatgaacactggactccatgcatattaaatgaagcagacaaaattatatacaagcttatacgacttgatagtcttagcgcctactggaatgtaaattgcagcatgtcttaccagagatcaagggaacagattttggatcagctgaaaaatgaaattcttacaagtggaaatatacccccaaattatcaatacattttccagccaatatcagcctctgcaaaactctacatgaatccttatgcagaatcagagctcaaaacgcccaaactggattgcaacatagaaatacaaaatattgccattgaactgaccaaacctcagtacttaagtatgattgaccttttggagtcagtggattatatggttaggaatgcgccttataggaaatacaagccttatttaccacttcataccaatggtcgacgatggtggaaatatgcaattgattctgttcttgaagttcatataagaaggtatacacagatgtggtcatggagtaacataaaaaagcacaggcagttactcaagagttataaaattgcctacaaaaacaagttaacacagtctaaagtctcagaagaaatacagaaagaaattcaggacttggagaagactctagatgtttttaacataattttagcaaggcaacaagcacaagttgaggtgattcggtctgggcaaaaattaaggaaaaagtctgctgacacaggcgagaaacgtggaggctggtttagtgggttgtggggtaagaaagagtctaagaaaaaggacgaagaatcattgattcctgaaactattgatgaccttatgactccagaggaaaaagataaactcttcactgccattggttatagtgagagtacccacaacctaactttacctaagcagtatgttgcccatattatgaccctgaagttagtaagcacctctgttacgataagagaaaacaagaatattccagaaatactaaaaattcagataattggcctgggcactcaagtatctcagcgaccaggagcacaagcacttaaggtagaagcgaaattagaacactggtatataacaggtttgagacagcaggatattgtgccatcacttgtggcttcaattggtgacactacatcatccttgcttaaaattaaatttgaaaccaatccggaggatagtcctgctgaccagactctgattgttcagtcccagcctgtggaggtcatctatgatgctaaaactgtcaatgcagtggttgaattctttcaatcaaataagggattggatcttgagcaaataacatcagcaacattgatgaagctggaagaaattaaggagagaacagctacaggacttacacatattattgaaactcgaaaagtccttgatttaaggataaatctgaagccttcttatctagtagttccacagacgggtttccaccatgaaaagtcagatcttctgattttagattttggtacatttcagctcaacagtaaagatcaaggtttacagaagactactaattcatctctggaagaaataatggataaggcatatgacaagtttgatgttgaaataaaaaatgtacaactactttttgcaagagcagaggaaacctggaaaaagtgtcgatttcagcatccatcaactatgcatatattgcaacccatggatattcatgttgagttggctaaggccatggtagaaaaagacattagaatggccagatttaaagtgtcaggaggacttcctttgatgcatgtgagaatttctgaccagaagatgaaagatgtgctatatttgatgaacagtatacctttgccacagaaatcatcagcccagtctccagagagacaggtatcctcaattcctattatttcaggtggtacaaaaggtctacttggtacttcactattgctagacactgtggaatcagagtctgatgatgagtattttgatgctgaagatggagaaccacagacttgtaaaagtatgaaaggatcagaacttaaaaaagctgcagaggtcccaaatgaggagctcatcaatcttctactcaagtttgaaattaaagaagtgattttggaatttactaaacagcagaaagaagaagatacaattctagtatttaatgttactcagttaggaacagaggccacaatgagaacatttgacttaactgtggtatcttatttaaagaaaatcagcttggattatcatgaaattgaaggatccaaaaggaagccccttcacttgattagctcttctgacaaacctggattagatcttttgaaagtggagtatattaaggctgataagaatggacctagttttcaaactgcttttggaaaaactgaacaaacagttaaggtggccttttcatctttaaatctgttgctgcaaacacaagctcttgtcgcttctattaattacctcacaaccattattccatctgatgatcaaagcataagtgttgctaaggaggtacaaatttcaactgaaaaacaacaaaaaaattcaactctgccaaaagcgattgtatcctccagagatagtgacattattgatttcaggctatttgccaagttgaatgctttctgtgtcattgtttgcaacgaaaagaacaatatcgccgaaatcaagattcaaggactggattcctccctttctctccagtcaagaaagcagtcactttttgcccgactagaaaatattattgtcacagatgttgatccaaagacagttcataagaaagctgtgtcaataatgggaaatgaagttttccgttttaatttggatttgtatccagatgctactgagggggatttgtatactgacatgtccaaagtggatggtgtgctgtctctgaatgttggctgtattcagattgtctatcttcataaattccttatgtcacttctgaacttcctgaataatttccagacagccaaagagtctctgagtgctgccactgcccaggctgcagaaagggctgccacaagtgtgaaagatcttgcccagaggagttttcgtgtttccatcaatattgatttgaaagcaccggttatagtcatcccacagtcttctatttccaccaatgcagtagtggtagatcttgggttaatcagagttcataatcagttcagtctggtgtctgatgaagactacttaaatcctccagtaattgatagaatggatgtgcagctaacaaagcttacactttataggacagtgatccagccaggcatctaccatcctgatattcagctgttgcacccaattaacttggaatttcttgtaaatcggaatctagctgcatcttggtaccacaaggtgcctgttgtggaaattaaaggacatcttgattcaatgaatgttagtctaaatcaagaagatcttaatcttttatttaggatactaacagaaaatctctgtgagggtactgaagacttggataaagtgaaaccaagagtacaagagacaggtgaaattaaagagccccttgaaatctctatatcacaagatgtacatgattcaaaaaatactttaacaactggagtggaagaaattaggtctgtagacatcattaatatgctgctgaattttgaaattaaagaggttgtggttactttgatgaaaaaatcagaaaagaaaggaaggcctttacatgagctaaatgtcctgcaacttggaatggaagctaaagttaaaacctatgacatgactgctaaagcttatctaaaaaaaattagtatgcagtgctttgatttcactgactctaaaggggaacctcttcacattattaactcttctaatgtgactgacgaaccccttctgaaaatgttactgacaaaggcagacagtgatggaccagaatttaa

SEQ ID NO: 2319 - protein, 1515 aa, Homo sapiens
  VARIANT (1)...(1515): Xaa = Any Amino Acid
MVLESVVADLLNRFLGDYVENLNKSQLKLGIWGGNVDNLQIKENALSELDVPFKVKAGQIDKLTLKIPWKNLYGEAVVATLEGLLVVPGASIKYDAVKEEKSLQDVKQKELSRIEEALQKAAEKGTHSGEFIYGLENFVYKDIKPGRKRKKHKKHFKKPFKGLDRSKDKPKEAKKDTFVEKLATQVIKNVQVKITDIHIKYEDDVTDPKRPLSFGVTLGELSLLTANEHWTPCILNEADKIIYKLIRLDSLSAYWNVNCSMSYQRSREQILDQLKNEILTSGNIPPNYQYIFQPISASAKLYMNPYAESELKTPKLDCNIEIQNIAIELTKPQYLSMIDLLESVDYMVRNAPYRKYKPYLPLHTNGRRWWKYAIDSVLEVHIRRYTQMWSWSNIKKHRQLLKSYKIAYKNKLTQSKVSEEIQKEIQDLEKTLDVFNIILARQQAQVEVIRSGQKLRKKSADTGEKRGGWFSGLWGKKESKKKDEESLIPETIDDLMTPEEKDKLFTAIGYSESTHNLTLPKQYVAHIMTLKLVSTSVTIRENKNIPEILKIQIIGLGTQVSQRPGAQALKVEAKLEHWYITGLRQQDIVPSLVASIGDTTSSLLKIKFETNPEDSPADQTLIVQSQPVEVIYDAKTVNAVVEFFQSNKGLDLEQITSATLMKLEEIKERTATGLTHIIETRKVLDLRINLKPSYLVVPQTGFHHEKSDLLILDFGTFQLNSKDQGLQKTTNSSLEEIMDKAYDKFDVEIKNVQLLFARAEETWKKCRFQHPSTMHILQPMDIHVELAKAMVEKDIRMARFKVSGGLPLMHVRISDQKMKDVLYLMNSIPLPQKSSAQSPERQVSSIPIISGGTKGLLGTSLLLDTVESESDDEYFDAEDGEPQTCKSMKGSELKKAAEVPNEELINLLLKFEIKEVIFTKQQKEEDTILVFNVTQLGTEATMRTFDLTVVSYLKKISLDYHEIEGSKRKPLHLISSSDKPGLDLLKVEYIKADKNGPSFQTAFGKTEQTVKVAFSSLNLLLQTQALVASINYLTTIIPSDDQSISVAKEVQISTEKQQKNSTLPKAIVSSRDSDIIDFRLFAKLNAFCVIVCNEKNNIAEIKIQGLDSSLSLQSRKQSLFARLENIIVTDVDPKTVHKKAVSIMGNEVFRFNLDLYPDATEGDLYTDMSKVDGVLSLNVGCIQIVYLHKFLMSLLNFLNNFQTAKESLSAATAQAAERAATSVKDLAQRSFRVSINIDLKAPVIVIPQSSISTNAVVVDLGLIRVHNQFSLVSDEDYLNPPVIDRMDVQLTKLTLYRTVIQPGIYHPDIQLLHPINLEFLVNRNLAASWYHKVPVVEIKGHLDSMNVSLNQEDLNLLFRILTENLCEGTEDLDKVKPRVQETGEIKEPLEISISQDVHDSKNTLTTGVEEIRSVDIINMLLNFEIKEVVVTLMKKSEKKGRPLHELNVLQLGMEAKVKTYDMTAKAYLKKISMQCFDFTDSKGEPLHIINSSNVTDEPLLKMLLTKADSDGPEFX

SEQ ID NO: 2320 - DNA, 227854 bp, Homo sapiens; identical to SEQ ID NO: 2305
  misc_feature (1)...(227854): n = A, C, G or T/U

SEQ ID NO: 2321 - DNA, 3446 bp, Homo sapiens; identical to SEQ ID NO: 2306

SEQ ID NO: 2322 - protein, 434 aa, Homo sapiens; identical to SEQ ID NO: 2307

SEQ ID NO: 2323 - DNA, 5521 bp, Homo sapiens; identical to SEQ ID NO: 2310

SEQ ID NO: 2324 - protein, 1118 aa, Homo sapiens; identical to SEQ ID NO: 2311

SEQ ID NO: 2325 - DNA, 1913 bp, Homo sapiens; identical to SEQ ID NO: 2312

SEQ ID NO: 2326 - protein, 439 aa, Homo sapiens; identical to SEQ ID NO: 2313

SEQ ID NO: 2327 - DNA, 8451 bp, Homo sapiens; identical to SEQ ID NO: 2314

SEQ ID NO: 2328 - protein, 1791 aa, Homo sapiens; identical to SEQ ID NO: 2315

SEQ ID NO: 2329 - DNA, 252 bp, Homo sapiens; identical to SEQ ID NO: 2316

SEQ ID NO: 2330 - protein, 83 aa, Homo sapiens; identical to SEQ ID NO: 2317

SEQ ID NO: 2331 - DNA, 4634 bp, Homo sapiens; identical to SEQ ID NO: 2318

SEQ ID NO: 2332 - protein, 1515 aa, Homo sapiens; identical to SEQ ID NO: 2319
  VARIANT (1)...(1515): Xaa = Any Amino Acid

SEQ ID NO: 2333 - DNA, 4532 bp, Homo sapiens; identical to SEQ ID NO: 2308

SEQ ID NO: 2334 - protein, 1144 aa, Homo sapiens; identical to SEQ ID NO: 2309
  VARIANT (1)...(1144): Xaa = Any Amino Acid

SEQ ID NO: 2335 - DNA, 279101 bp, Mus musculus
  misc_feature (1)...(279101): n = A, C, G or T/U
gttcagtacactcttccagcttctaagagcactgcacgaatgtgttgcatagatgtacatgcatgaaaaaaaaacctatatacataagagtaaaaataaattctaaaaaaaagttgctacctatacagaggaattttagaaaaggtggcttgtaattctctggaaaagaaatagactacataatatatcatcaggttagaaatatcacacctaagagggctagagatggctcagtggttaaaagcacttggggctattgcaggggacccaggtttggttcctagcacctaccttgggtgtttcaccaacacctgtaacaactccaactcctggggaatggatgcctctggcttctacaggcactggcacatatgtacatacccacacacggatacacacacattattaagaaatagctacataaaaggaacatcatattaaaaattatagaaaactgctagaaaacataaacccgattacatctacttagaagatagtttagtttgctttaatgtttagcatttaattattcaaacagccaaatgggacatgtggggtagttttgggaatgactttcattttaaagctttttgtgtagttaggagtcacaccctatacacatcagcatgttttcaccaagccttctcatattctcttagctgttgacgtgtccagagactttaagaaatagaatatccttaggggacagtaagaataaaggattaaacatatgtaccttcaagcctctctagtcaccaaagattttataacatgactattgtcactatgcaatgcattattgcaagtgccatcctagataggtgaagatgtacttcctcttatacagactggatttagttcttagcactcatgtcaagcagttcaaaaccacctataactccaatgtcagggggatctgaagcctctggtcttctacaggcatcttcactcccacacacacatccacacacatgtacataatgttaaaatctttaatatacaaataggtgcagagtttacattgtaaactttgctaattctcaatctttatccaattcagtaacgttcatgtgtgtctatcattgcttactcttgacattgatcattctgttttgtattcattcattcattcattcattcatgttatttgtagggctaggatttcaacctagggccttgtacatgctagtaagtgctaatgtcttaaaaatattctattttagggtttttcatttctatgtatacatatgtgttacgtatatgtggatgtgcatatgggtgcctgaaaaaaagcatttgatcccttgagctggagttccaggctgctctgaggctctccatgtggctgctgtcagctgaacactgcttctgtaagagcagcaagcactcttaactgctgtgccatcgctctagccccttaaacataattgttcgcatgtttctcattttacttttgtttctttgatggctaaatatgcatattagccattttaagcttttctttttataaatagtctgacatgtgctttgtcatttgaacggtctgtccactgtgtgtaaatttttgtatctgtttaattaagagattaaccaagactcgtggtcccttctagacatagcgagtgagtcagacagtgagtgcagagcagacaacttgctctcactggagtgtgagtcctcccccacccccagggtcttatgtcttacccattagctcatgctaatcagcccagtatttcgaacagttcttctctttctctgtgtgtgcctatctataaatcagttcagttctacagatggagctaaaaggaacacagttgatattattgatgggctagcagcattcttatgctctgtcctttggggaccaatactctttgagatggtcagcaagagaagactgatgtatggtgaagagacccctgtttctctgagagaagttaacagatcctttggggatatgtgtatgattttgatttctcattagcattgcgagtgccaatgaagtgtgactgacagttacataagtcaatacaagagcacttcgggagagccaagttttggatttttttttttcttatagattaggcttccgttctttcagaactcactgggaaagcaaatcagaatgcttttgattcaagaattgaacgcaatgaagctacgtttctaaggaaactatcgtggttaaagggaaataaaatgctaagtttattgatcaaatgaaacgtaactggcagagatgaaagtacaccctagacctggtcagtgctttcatttttactgtatctgtatgtaattcatgttttatctgaagactgagtgcaactttccgggctcacgaagcaaagaacatttaataccaggaagcactcttcatgaaatgttaggaaatatcaatatggaccaccagacaaatagaagtaagagggagagagtagccaaagatcgtgcaagcaatgagccagtcccgtctgctatactgggttttcattcccaacttcagaggaagtcaatgtctttcaatgggaaagacacctaaggactgaagagatgagtaagtcagtgtgtatcaaacaagcatgagaatgtatatttcaaccccagagtccacatagccaggtgtggtgttctgtgtctggagtcctagcactgggaaggcagaggcaaaggcagacagatttctggggttcacttcctggtcagcctagtgttatattactactatatcttggggcctgggaagaaggtgcagcagttgtaagcatatactgttcttgcattggacctcagtctggttcccacatggattgcttaaaactgcctgtaatttcagatctcagggaatcccacacctttagcctcctcaggcaccagtactagtgtgtgtgtgtgtgtgtgtgtacatgcatgcatgtgtgcacaccaaatgctcatatacataattaagaatactttttaaaaataaccatctcttaccaggcgtgatgatgaacaactttaaccacagctcttgggagtcagaggcaggcagatctctgagtttaaagagatcctggtctacataaggagttctaggacagctagagctacactgagagaccttgtctcataacaagctaataaacaaaagcaaccacatatcctttctaatgtcatcaaccctttagcattatttattaatttaaaaagaactgtattgtcaatcaatgcaagttactatttcttggggttcatttctctgggtcaactgatctagcttaattgccttacattaggtgatttaaattgcacttgataatgcaggctttcagagaagtttgggaacaggtgcccttacattcctcaggaatattgcatcttgtaactgttccttgcatttctaatgtcaccacaccagcattttgtgcaattacacatgagattttggtgattggcacattcttctctaaatctaaacatggattataatatttcctgtttcatctgcattatacacctacgggatagttttatgatttctaatctttcaatatttcaccttaggcctttgaactatattcaatagtatgataaaagaatacctcagaatatttacatgtctttttagaattcttaatgatgtgcttctgtgtacttctgtttttatgcattgtagtagacatttatttttcattttgtgtatatgagtgttttgtttgcctgtatatatatgtgtaccccttctatgcctgattctcagtggaggccagaagagggggacaaattccctggaacttgttatagatgttatgaattaccttataggtgctgggatttgaaccttggtcctctggaggaatagccagtgctcgtcattttcccagccctccattgcggtgggcaatgatgattctgttcacttagttccctaagttagttcatggatgatgatcccttttatttttctttccccacctacttttttggatttgaaaattctgacgtagtgctgtctttttttctatattttctatgggatttctaaaactcccccaccccagtacctttaaatcctaatatctactattatatactcttgccttcttttccccaaggattttatttttatttttatttatttatgtgtctctgtgtggatgccatatatgttcaggtgccagtggaggccagagagatcccccagatctggagtcacaggtagttgtgagctgtctaatatgggtcctaggnnnnnnnnnnnnnnnnnnnnnnnnnnnnnnnnnnnnnnnnnnnnnnnnnnnnnnnnnnnnnnnnnnnnnnnnnnnnnnnnnnnnnnnnnnnnnnnnnnnnnnnnnnnnnnnnnnnnnnnnnnnnnnnnnnnnnnnnnnnnnnnnnnnnnnnnnnnnnnnnnnnnnnnnnnnnnnnnnnnnnnnnnnnnnnnnnnnnnnnnnnnnnnnnnnnnnnnnnnnnnnnnnnnnnnnnnnnnnnnnnnnnnnnnnnnnnnnnnnnnnnnnnnnnnnnnnnnnnnnnnnnnnnnnnnnnnnnnnnnnnnnnnnnnnnnnnnnnnnnnnnnnnnnnnnnnnnnnnnnnnnnnnnnnnnnnnnnnactccaacacacaccacacacatgtacatacacatcacacatatacacataggatacacaacacacatacacaacacacacacacacacacacacacacacacacacacacaccactcctctttttccttctgttgtctgcttctattgttctctgtcactttgctttgctttgttttctggctcccatgagaaagccttccttcagaagtctgatagtctttgggtatctgtttacattaaagaaaaagataacacatgtttatgatcgtcagaaacagagtgagaagataggggcagttaatggtaaactttcccatagagccatctgtttagggctaggaggtgtgctcaatggcagagcactagcatgtgtgagtttaacttctagtactgatttaaaaaaaaggtgaggaaagtgagaaataaaaagtgtggtggtatggaaaactcttgaaccatcataaacatgtgttttgcatggatgcactaagtagggaagggaatatggagatcagaacccaggtcttttggaagaagagtaagcgctcttaactgctgagccatccctcctgccctaaccattcactttccaagtgtttattgaaactgaaatgtatggctaagtataataaaacatttggttttttttttttctgatgtttgaatttgttttgattttgatttgtatggatggatgttttatgaagtgaaagaacccggtggcagtagagggcattgcatttaagatggattatttgggaccatctcctcaattctggtgctttgcctggtgtcgggacacagacctgccatcctagtagttgggaggcagaggcaagaggaatgggagttttgaagccagcctgtactgtatattaggttcaaaaagtaaaaccaagcaagcagggtttttctgtttttttttttttctgttttttttttctccctttttttgatacagggtctttagctcggactgacccccttcagtctcagtttccatatacggggtttctactcaccacctgtcttagttagggtttctattgctgtgaagagacatcatgatcaagacaacttttatacaggaaaacatttaattggggttggcttgcagtttcagaggtttagtccatcatcatcatggtgggctgcatggcagcgtgcaggcagacatggtgctggagaaggagctgagagttctacattttgatccacaggcaacagaaaagagatggtaccacactgggcatagcttgagcatatgagacctcaaagtccacccccacagtgacacacttcctctaacaaggtcatacctctaccttctaatagtgccactccttatagggcaaacattcaaaaaggagtctatggattcaaatcatgacatcacccaactcactttttcctgaaacctgaatataacatttgtacaaggcaatccgattatttttttttttttaaagatttatttatttattatatgtaagtacactgtagctgtcttcagacactccagaagagggcgtcagatctcgttacggatggttgtgagccaccatgtggttgctgggatttgaacttcggaccttcggaagagcagtcgggtgctcttacccactgagccatctcaccagccccggcaatccgattatttaaatgagtataagtgatcctaggaaggaatagataactattttaacttattggcattcaaagagaagataaagtgttcattacaaattctcaggaatcggggagattctgatagaaaataatgagtttattgatggtgatttgtatactccatgttacaatagcttgaacaagctcagttttcagttggtccatggtaggagtgccatgaagtaaaggtatgacttaataaattgttacataaaattgtttctgtttgcttaaggggtcagctgctcccccatggagcagatagaaagaagagttgttaagcacaaaccctgcatcttagtaatactaggagaccagtcactttgtctaatagcaatttgttatacccacttctagcttgacttgagtagctcttttctctttcttctcctctgagctttctagaacattcatcttttaaaaaggggccaaggtcaagttaatttcccaaggaaacaaaaaagcccactgctttagaagcttttcttttgattatgaatgtttgtcaggataacttgtttattaaacatatatgtgtttctgtgcagagcgagatggaagccatgctgatagaatttcagtgtctgctcatggcaagctacagtaggacagcaaagcttttgaatgacaatcttgttgaggacaaggtagattttagacttttggttccaaaagcatttaacaccataccttgaccatgtaagaaatgtgtgctaaatattttttcaatatttacttattgatattaacttagtacttactgttaattaacaggatttttgttgctagttctttctcatattctcaatagaattctagctctatccagcatactcaataaataatgtaataagtgctataaagttcagattaaatattttttacatttatttactttgtgtgtatgtgtgttagtgcatgaacaacatactatagaatgtacatagaagtccaaggacaactttgggagttggtatctcctttaaccatgtacttcctagggataggactcaggtggggccaagacaaaaaacaaaagtaaaaacaaaaccaaccaactaaccaaccccaaaattatacaacaacaacaacaaccacccccaccctcaaacccaagaaacaaatcaacccactttgggttatgcaatatacccagccctaaagctccactttcaatattgagtcttccatatttttcaggaatagatttggcccattattgatgggaatattatttctttatttagaaacacacagataccatttgaaagtataaaaaatttcatcctctaatttcaaaattctagctctcttttaaataaagccacatgtacagaaatatatttacatattaagtaactataatagaatgacttgatatagcttaaaacagaagaaataaattcaggttaccatcaagtctagtatcctggatacaatgctaggtgcttatcagtaccaacccacaaggaactcacaatctaatgacaaaacaacacacaaaataaaattgaattttccacaatagatatgaaaaccttccccagtcagactttcaaagtgaatcctctgatgtcctctaaaatagctgtgtgagcagtataagctgcctctcctttgccttggaaacagcatacatctcgcatggtttcatgccaccccttcttcttgtagtaattatttatctcaatcaggggtttctactctgcttttgatcattcaattctcagacaaaagacacacaacttttatatttataatgaccctttaatgtactagatctggtcagatatctaccttctaagctattatgtctacttccctatcaataaccccgagttgtaacttgccacatttcatctggctgtccttaactccaagtggccagctctcatggccatgttttcatgattcacctaccccatggtgtgctctcttctctctacctactaccctctcctcctggttcctgactgggaaccccaagcccaagaaccaaaactctgcctatctctcttctgctcataggcagtgggtatctttattcaccaatcagggataacttggggacaaggttacctaagtgcagattctctcatccctgggggcaaccaggccagtagttagtattacaatgcatagcagaagaccaaacctcagcatcttccctagagattgtaccacagaaatatggctttaccagttacctaatcaaatttcctggttgttctgtgactgctttttgcctcacttttgtatacaccaaattacggataaccaaaccctgttcatttaatcaatgatgctagacttggctcagaactgtttgatttatattggaaacatcatcaaagatcagatctctccttgcgaagactttcttcttgtctgtttgatttactctggctagatcttgagtttggaagatgacattcatttttttttttatagcatttgcaaaaatgttctcaaagacttcagcaaattgcctatttgtatgtgggttaaccatccgctagtcttagttggaaacgggatcgttatcattttttaggtgaaatcatgctactttgtttaggatggagacacactccacaagttgccagagcatgtatgtacctaagtgggactggctttgggggtgagtaggctaccattagttctggaatggtctatacggaggtcccacatataaaccttaatttgcttctctggttggacagctctggttgcagtaagtacagcaatggcacatttaactatcttctttatatgaacttctgaggccaacggctccttcttacagtcaggatactcaagagttggccactgtcttcaattcgtttctttggatgcttgtctcgagtgtttcttctgcttgggcctggctggtcttctctgtgctcgcagacctcaacacaatcaccttagcttcccctcaagtaaaccttaacttccaaggccgaatttttcccctttttctttggggcttcttcgggccaagttcggaacttgctcatcaagacttaacttcctggggctgtctctctggttacagcaaaggccaggcgcaatcctttcccagaacttggtgttgcagcgcggggctcaggtgggacggcacgctcaggtgagcaagctgatgagcgcggcgtgaggggctttgcgcttttcccacagagtccgcccaccacagctgcggctccacagccggcctcgcctcccgcgtccggcgtggctgagctccggaatggctgcgggtggcagatccagatgctgcccagctgcgtccccgtcgcggcacttcggggcgcagtgagcttgaggagacggccgccgcccgccgtgggctttgtccgtccgccgctccgccccgccccgtgcctccccgccccctccgcggtcccacttcctcggcgcgggaggcgggagcgcgccgggcagcgaggggttaagccgacgcgcttgaggcgcggagggatccggaggcgagcggagctcggtgctgaggccgcctcagcggaaaaaaaaaaaaatgtccgcctgaggagacccacaagttctatcggggggacagccagcccgcccggggagccacgggcggctaagcccgagagccgcccgagtcgcgccgactcaagcactcgcgggggcccgaggcaacgcagccgccggcggcgcgtggggagggggaaagcctgagcccgcgctcccggccaaagtgaactttaatcgggaaggttggatgcggagcccgggcggcaggtaaccgcgggcggcgggcgggacgtgcggaactcaggtccctttgtacggcgcggagcccggggccgcgtccaagttgcggcgcgcggcggggcggaggcgcgagctgcggggtccaggcccgggcagcggcgctcggcctgcgcggcgctcggggctcggcgctcggggccggggagccgccgagcccgcctcattgttccgcgagtccggggcagggcggcccaagtgggaggtggaggccgggcgggagtttgcggggcgcggacgcgcgtggggcgctctcaaccaagccggggacccccgctggggacgtccgggccgcagacgcgggcctgcgagcggcgcgctccccgcaacttgtcagctctattgttgctgagcgagtgagtcacttggtctccgggtcgccgccgctttctcgctccctcgctgggcgcgggctcgctccgtactcctccccgggggcaccccgaagccgagccaccttggaaacttgcgggagccacggagccacgcgtgggctcccgtgtcggagcggcttccgtcactgtccttcgggtatgcgtggggatctggcgtgtcgctcggcgccccccaccccgagcgctgcctctctctctctctccctctctctctccttctcacgtcgagcgtccgggtgtccgcggctcagcctgtcttctctgccttaggacctgctagaagtggctgaagatgaatccccagcagcagcgcatggccgcgatagggaccgacaaggagctgagcgacctgctggacttcagtgcggtatgagagctttcctccgcatcttggggttctgctgaggtttcccgagatcgggagcaagagagaaaaggggggaaagcgacatggcagcgggcaactccatctgcttttcagcgctagttctcagggctggagtccagctcccccaagttggacacctgaactttgatgtaatgtctagacttgcagatttcaaactttaatgccagaggggtcatttgatttaactagttaaaagaagaacaatgtaatcatgagctctggttgagtcactcccttctgataattattagagattttagactttatatgaaagaaaaaaaatattttttttcctgaagacttctcagcatttccctccccacgacttcatttagcctgtggtacctgagagatgccagcttcaaaaaagccaaccccagcgctagaattcccagccttgtgagctgactgctttaagtatacatatgccgtctgcatatgtaatatggaaaatgatttaaaaataaaaggtgaagctatagagcccattgcccttatttcttactaatggattgaatttcaacgttaactgctcctagaaggcagggccaatacctgctgtattagaactgttattatctttcctgtatgtggtaatttcatcggacatgattctgattgcaagtgcttattaagtaatgttaatgtaatgagaatcacttagggccaaagtgaagatcatgggtaaaaatttactgtttaaacttaattatcttgtaatcttgcctgtggctgggttttcatagcaaatgtcaccggttctctcaagcaatattagtaaataatatcacttgttattgccagccttggtctgaatgggtcttccatttttatttcaaattctctatgaaaattaggaacctaattgatgacacttggtgaacttttctttgcaaggaatatagaagaattttaagattaataggtacatttgggttattttgcagatgttttctccacctgttaatagtgggaaaacgagaccaacaacactgggaagtagtcagttcagcgggtcaggtaagacgatgttgaaaatcagaaatttctatttcagagcactgacatattttagtagaaaagtctataaagcattttagtgcctgccacaccatttttttacactgtccggttacaattataaactactagcgcctcaaacttggagagttgttctgaagattgcttggatgttttaaagaattttagcatggacttaaagttgctctttttgtgaatgttaagattgaaaattgtcttgagcatgatggattgtgtcatgactgtatttagaaaagtgcttgaagaaagctttgtggttcacgggtgttccttttatatatgcagacatttaatatatcttcagatcattagtgttattaaatcctaggctctaaaatggataaaagtattgtttaatctatgtgcataaaaagtagaattgagtcaaacaataattaataagttgtatttattttaaaaaatgggttttacactgtaggaaataagtaattttgtggatattaatttaaaatgataattctatattaaaataaggtcttattttaaatgacatagggccaaatttttgtcctgtaatcaaattatattaggatattttttaaagttagattcctaagcaatattattaatgttaaatttgcttgcttttggtaaactatgtcatattactaaatagtgtcccactttaaaaaaaaaaacttacaatttaaaagtaagtattccagagcagggatacagaagtttaatttgtttcatttcaacttattcttcagtgtccaagagatggggagaagagcattgagagcatggtcctgagaaaactggctgtagtgtgtctgggcaggagccgctcagtcactgctcactagagcagtgcttctcgtttaccctagcaaaatcatagctgctttccagagggctgtgagagcagaaagcctggaaattagcttaattttataactggcttaacattttattctacttctacttcatgtttagaaaaatgtttctgttgaaaatcacacatcagtttagctgaactccatttttaactatgacactgaagcatgtcatttaacaaatcaaagaggaaaataaaagcaatttgattgcatgtaacctaaaggctagttgtagtgttcttgaggaaatactcgccagagtccagctcttccaccatctctccttttgctggtaatcactggaacatttctgctttttaggaaagaggtagaaaattatttgtaaagaagtggctgtatgccatacctctcttagcatttagaggacttcttgattttacaactactaagagtttgttgtcacaaacttttagatttacctattgtaagacataataggcgggcgcctggtgtgttctgtgactcttgattgctattttatactgttagcttccaatcaagttgtggaaaacatatttacctgggcattgatcaggacaggagcactagaaacttgctgagagaatgcaattgacttatttttagatattaagaatgacttctgataggaaaccttctggtggactgcaggcatggcactggcattgccagcactctgcagggctgggtctcacaaatatttgtcatacaagttacactcatttttctggattacgatgtgtttggacttaagaatctatattctgtggacatagcagtatttagctgtggggtttgtttcaaaagaattataacataaagctcttcagtagttaatgagacttaaattttgagatgagaaaattgcacgaggttattttacagcaaaatacccaatgggtacagcttctccatagcctttcttatttcaaagtggatgtttaaaagaaattggcacaataatattctgtgtatgtactatgtgtgtatcttctagacatttgattaacctatgatgattccaaaggatacttgtaacatactctagttttattgatgtgcaacatataggaaggatcttatggctctttggaaatgtaaagactggaagtttttgtcttgggagtaacatgtgtggcacttgtcttttgcttggagagtgctgcagtttataatgtgcagtattatgtcctttttgctatttgtcctttcagagaatgacttaattttgtagttgattattttgaaacacaatccaaattatgcgcaagacttctgtattttcgttttagctgaaagtactcaatatgttctaaaaaattggatgttccatttatcttatgtctgaaacaaaataacttatatggtagctggtaacttgaatctgtacaatgtcatttctttatgaagatgttatttcctttgcattatagttagattgtaaattaatctagttggtgtggtaggctatgtgagatgttctctaatgaccttgtggtaagtgtttctttggaaataaaagatgggatactccagattcatacatagttataggaaataatagatacatctgagtgtagtggctcacacttttaatctcagtttttgggaggcagaggcaggaggaacaggaatttaaggtcagtctgggctgtgtgaaactctgtcaaaaccaaccaaccaaccaaccaaccaagacccaaaataacaacaaaagaaggaaagtatccatatccaatgtcccctttcccattttcctttagtggtaatgtttggctgaaacatagcagtgtcatacatagggtgctgataagtggtgaggtaaagacaccctcatgctgccctttcataatcgcatacacttcctagtaattagaaaattcataacattattaagtgtttactcactccattaagtatggtaagattatgaagtgtggacgagtcctatagcattttaaattgctatagttgcatttgatacatcgtgtgaagaagaaatgaagacagaaaaccgaggtttagctaatgtgttttgaaactgaacaatattataaacagaaaaagtgatttttttctttaataaaaaggacactaagttggcttgtcactcaggattttttcaggttatgagtgggatgtggacctttgtagacctcagtactaagttttagtaacatgtatatgatgaaagccaacatttctagatattgctttaggtaatattactgaaaagtagtaactgtatagtcagctggggtatggggacatgtggaatatttttaagttaaaattattaaggaaaaaaaagataagtagcaaagacatctttcaggaaatacttgtaaatgaaagtacaaacttgaaaaacagaaaaatgaaacacaggattgtagatgtgagctctgtgtgccctcgagaacagttcccgcagtgtctttcctcagatctctgtgttagagacttggtatacgtagtgaaatgtgtttataatggattgtttttgtcgttatcaacaacttaaatgtaaatgtatatttctgtctttaaactatcttttggtactttgtcttctctgagtttcacaatggttcttttggataggaaaataaaaccattcaaccttaattataatcacagttgtttctacattttaatttaacaggtccatagagagtacacagttatcaaaaccaggtagtcttttctgttcttgaacaattagtaatcattcctggaatttactgcctgctttatattgttgaaggcttgggtatcttgttacaggggagttctctgagattagggtgctaggatgctagtaggtggggactgaagaaggaaaggaaaacctgtttctggacatccataagataccttaaaacagaaacaaaacaaaacaacaacaagtcccttcaacagttataaaattgcttttggttgtcacctgaatgaaatttttagttgggaaagttggaattacaattctaatgtagtttctatttaagaaacaaagtgagaaaactaacatatcaccacagaagactattgaatggtgttctgctatgttaaatagttgagtcatatgcaggctattgtcagtcagttaaccatgcattagttactactttattcagcctaatattgtagtattagcatttgggaagatgggaaatagagaaagtcttagaacggaagtggagacatgttgctatttatgtgtaaagataaaatatcaaactgtaaggtatcaagaactgtgtgttatgtaatttaaatcgagtccatgagaaggctgtgctgtagagtgagggaaccagcctaacttacaagacttgatttagtgttgacttgggagggtaatgtgcaggattattaagggagcaggagaactcacttcctagtggttgggttagtacaaagtggtaatttggtgggaccaaagggcctatacattttgagaaaagagaagttggcttaactagttgccattccagaattcatatttacaaactattatcttggagctgagtttttggggtcacagttagacattatcacttactagcttggtagatatgagagaattacccagtggccccccccccccccccgccccacactgctcttaatctgttaggtaatagctccttgtaagtttgttatgagggtcagaggggctcataaatggaaagcctcaggaacggcacgtgctctgctgcaggcggtggtggaatgagttgttgctgaggaggaacctgggtaagggaaacgtttatccaggaggttgcactaatttagagatgctattactaaggtttgaatttaaccacagtgtgtgtgggaactagactgaaaaaaaaaaaactgggagtaaagactcacagatgccaaaaaaccagagttctgtgggtgagagagagagagagagacagtaatagttctgaaaataatgaagatgaattttttttgagtcttaaatttgacacaacctacttgcagggttatagatcagtggtagaacatttgcttagaaatcagatcaattgagtttgatttctcatgttgtaaaaaaccaaaccaaataaaaaacaaggaacatacaccccaataataaacacatacaaattcaaatgattgaaatttattatggctaatttggaggtcgtttgtggggaaagtgctaggaagtgagttaaagagttttagagaaaacaggcaaatgacaactcacctttcatctgcctataaaattaatgcacagttgtcagctgtgcatttgaaaattggagaacaggggaaaaaattaccacccttagttcactgcctagagaaaactgttaggttttgatttatttcctttagttccccccaccccccaagtcctatatttgtgaaatcttaatggtagttccactttatatcctcccctaaaatgccactgtatattctgtcatgactattttcttttattatatgctctatcaacttggtttaaaatagttgcatcttttgcatggagtagatgcagcaatacttaagttttcctattatttacatgtagggattttgttactgaattgagctttcaatttagtagcagtgttgccctaagcacatcatttaacccccctgagcatacttttgttatttgtgtaaagtagataatacttattttccttttgatagtatagtaatgaagactttttaaaaaaatacatttatgtgtttaccacatacagattttctttgggaggaatacagaatttcttttcctacttataagttataattaaggagttaatgaattctgtagggaaatgaactcagtgggataaatgatgtggctatgaattaatgttagtggtggatttagatgtttataatctgactttgttgattaaggtaaaagtattcatgcttattagcatggatggagtaagtggtggcgactcaccacagcagtgttagagagagggttatgcagttgttatagagttagagaattccctgtagtctttgacttgtgcctactgggatggagaggaaccaactgaattagtgagaaagtccttgaattgtggcttttcaggaaaggggcagagtcatgtagtgggtggagttgaccttcagagtcatccaattgacctggaattgagctttcaatttagtagcagtgttaccctaagcacatcttttaacccccctgagcatacttttgttatttgtgtaaagtagataatacttattttcagaatccttgtgagaatgaaaggaagttacttactgtgtattttacataccacagagctaactcaaatgttgactattaatattgtggcatcggttcccccacatccccctttttcaaacaagatctcactctgtagcccaatctgtactagataggactcactgtgtagtccatagcatacttgaatttatggtaatcctcctgcctcagtctccaaaaagctgggattaccggccggtatggatagtaccatatccatgatgcagtttcttcttaattagaatttatgggcaacattaatagtaatgataattataatcagtattatatccagtttttattaaattgttaggatatgataggcagtgttctaaatagtttacattattatcattgtggtggtggagttgagtaaatgtctcatgagctgcttttttttttttttaaagaatttatatgagtacactgtagctgtcttcacgaacaccagaagagggcattgaatcccattacagatggttgtgagccaccatgtggttgctgggaattgaactcaggacccctggaagagcagttggtgcttttaaccactgagccatctctccagcccctcaagctgcttttttgatgtcataaatttatatgtgtttttacatgttacatgtataagacatacgaaaacccaagagttggtttgaaggatctggttactaagtaatttaactggttgtttccttccttcttctttttaggtgatttcttctcagtactgttattctgtagaccacatacatacatagggtatggagtgtacatgttcatagggtacggaatggtgaatggaatgcgtatactttttataaacctcccatgcttaggtaccaccattttttagatgtatgtagtgttttctccatagtttctctacctgcttgaaattcttaatggaataaataacctaggaggataatctagctgggagagatgctgaagagactccagaagttaggctagagcagtgggttaacctgtggattaattttaacctgtgggttgtgacccctgtggggtcgagtggccctttcacagggggtcgcctaagaccatcagaaaacacagatatttactttatggttcatgacagtaacatgaagtagcaatgacataatttaatgttttgggggtcactacaatatgaggaactgtgtaaaagtatcatagccttaggaaggtcaagaaccactggtttagaccactggtctccacttttcacagttacggtagagaaagagtaaagaatgcactgcaagttagcagaaacaatcttacctaaactgcatgtagttttcttcttcttcttcttcttcttcttcttcttcttcttcttcttcttcttcttcttcttcttcttcttcttcttcttcttctttttttttgttttgttttgttttttggtttttttcaagacagggtttctctgtacagccctgtctgtctgtcctggaactcactttgtagaccaggctggccttgaacacagaaatccgcctgcctctgcctcctgagtgctgggattaaaggtgtgcgccaccacgccctgctgtagttttcttcttaatgtctagcacagacatgcttcttgtaaaacaagtatgcttttatttgtctacgtaaaactgaagctctgaaggttaccatgtttactcagcacacagcactgctagtctcccactctgctctgtgtctggagatagggccagggatggttggctcctggtctgctcccagttaggcccagttcgagagtgcattcttcagcggtgcttttcttgtttttgagaatactgtattttaaagcaagaatggctttgtaagtagaacactgttagttcataaactaaagcttaggtagatatgttgatagtgtgactgctgtttgaacctgctttctgtttccagtcaagtcatcctataacaacaataaagatttattcttttcattttatgtgtgtgggcatgcctggtattttacttcttaatgcctagcacaaacatgcttgttataaaacaagtatggcccatggaggccagaaaaggacattggatccctgggaactgaagttacagatggttgtgagtcactgtgtgggtgctgggagttcaccctgaatcctctgcaaaatcaaccattgcttttaaccactgagccatctctctcgtccctcatcctatattttttaaatatacatttgagatgggaaaaattatatttttataaaaataccttaacttttgttctatgtttaaaatgtgctcttttatgttacaggttaaaattgtggtcatagagtgaccataatgagtcacccaagctcttgaaatgtgcttggggccttagagatcacacagaaatgaaaacagattaagatttggttactagttttaatcttgctgatcatgagtcagtgatgaaatcttcaaagcaatataataatacaatttgagataacttacaacagactttttctttttcttaaagctttgctatcacatctcaacatactttttgtttttaggacttggagataaatagacatggcagtttacactgctaatcacagcatgtagaaggctaaagctggaggattgtgaatttgaagagagcctgggccttatagtgagatccaggtcagcctagtctaaagaaagccaaaccgaaagaatcaaaaattagagtttgttcaagatgagatttcatcccctactttgtggttaagaggatagctaggttggggttgggagtctctcagaattgggataatcaggtagatgaaatgaaacagtattcttggaaccaggtgggagtcctggttcagtggtgtccttgtttctggtgacctaatgtgagcaggatcgcttcacagttagagcctgtactacctttgctttggtggctgacagtgcaggctgcatatacagtaactggcacagtgctgtgactgtttgtgggacatgtaagatttgtggtaagagccagcacacttcagtcctggaggcatgtgttgttctgaggttgttggagatcgatgaggtttgcttgtactattggggaggagaacgtgctagcatcactttgaagttagagtagaaacatggtgtggccatccataggttcagagttggctgcttgtggagcaggatggaaaaatctgagttctcctgagttacaggtttctctgaggctttgtttggaagctctgtcaagtgaagctgtatcttcaggtttttgtaaactgtttttcagtgttaacttcagtttagaacaaagttaaagaaactatttttgtattgaatcccttggggctgacaagataggtcagtggtaaaggcgcttaccaccgagactgatgacctaaagtttgatccctgggtctgacttggtgagcggaaagacctgactgtcagcagttcccttctgacgtctgcatgtgctcagtgtcatatttgcatatctcccctctagcccccaccatcataaacagcacaaaaaaatccaactttttttattggctgtcttggtgtaaacacatggacagcttggctggattaaagctttccagttaggcaagcatctgaggatttcaggactctcagatgccctcagtgtctcctacctgagtgttagtggctagtattattccaggttaagtgtgttttgtttactgtaatcccatttctgggccatagatgcatagtctatgagctgtaatttttttcaaaaacaattttttattagatattttcttcatttacatttcaaatgctatcccgaaagtcccctatgcccccccccttgctccccaacccacccactcctgcttcctggccctggcattcccctttactggggcatataatcttcacaagaccaagggcctcgagctgtaatcttaaaaccagaaaagtctaaactttttaactacaaatttagtagataaactattttgctggcaatatatggtttaatatgcaaaaaggccattaaaaccatctgtgtccccagtttttgtatggttatcagtcaggtgttggaacaatttctaacatagtttatactattttttttttctaaaatctgaaaacttccaccgaaacttttttttttttttttttttaaacctcacaaaaaggatttctttctttgtactaaaagtatagactgggaactttaaatacagaaaaaaatggggtaaattagttctgtaacacagattattgagctagaggattttcagtctaagttttgtcctttgagtgttttttgtaataggctgatttagggacttaagattctactttgaggataaagtagctgtcttgtctttgggccaaggaatactcatacttctctgttcagctaaagcacacaggaaaatgttcaaggttctctcagagtggaatactttcattctttttctgtttgttatataaccagcattagatgatgcccttcaaaaggaagtttcattctttatcatagcctttctggattttgtcagttttctggtagcagatagagaagaaaatcctccaagggttaatcagcttcatgaagaaaacgtggagccacgatacaggcaatagacaaagtcactttttgataaattctatttgttatttttggaaaagttttcagattagtggctaatgtttattcctatgataatactcattgcagtctttttcattaaaataaatgattttaatgagtgagattcttactgcctagttggttctgtcccatggctgttaacacagctatggaaataatgaaatgtatagtgaactgggctttgtagaatctgctctggcttttccatttactttgcaaacttgtttattctactgttctagtgttaattatgtaaataaccatggtgcggtattggataatttaattggcttagctggtaactaaatagtaggcacacaaagcaggctgtatagccagggcctctcttgccttcagttttacttatttcttcgtttctagcctagaatggtacttaagtgagcagattcaactgaaatcaagatagctagactctggagcctaactcaacaagttgtaatagcaactgggctttgcccagtgattggtgaaaggggcagagtctcagtcattataaaaatactttataaacatttacttctgtactgtttacttcacaggttttgtgagatgttggtaactgttcatttcacagaggaaacagaaatcaagagtgatgcatgtttggtgtggtttctgactgcccctcaagcagcggtagtcacacctgcactgataccaatctgcatagcttgtcttaaggagaaacttactgtctctagaaatcgttagaatttgttgttataacaaggagtctaatgtaagggttaagttgatattttcaaaaataaagtgcttcaagatttgtttttattaaaaagaaaatagtataattataagtttacatcaacaggtaagcattttaaaagtatttcaagatgttaattgcaaacagttacagtccggaccatctttgggagagaggaactttgtgtctcattgtttagctgtctttgtgtttttggaagaataggaaattttttatagttgttatggattggaatatttaaacttattttcaattgaaactattacatcttccactgtaacacatctccaaggttgtaaatggtactaagtacatgaagtacaaaactagactatgggaatttgcattagggcttctgaactcaccttagcattctttagagtgctgtcatctgcctttatctatttattgttgtgattggtggttattgttatttagattataaacattttgaaaacaaaagtggtagtttgtacttgtgattcagcaaaacaccacttgttaaggttcacaaatgtttgaattaggtttgactatttgtggtaatttggaaagacattaaatacccctatttttctttttcttccctagcatcatctgcatggcaaagcttagaggaagcactaagatttatgaggataagcagactagagacttgaagtgtgtaccttttatttagaatgttttacctgtcctcttattttcttctgcaaagctcttagcccattcaggactcctcatttaagtatcaacgatgagcaggaagtggccaagtggtaaagccattgaggttttaacaggagtacagctggctctgcagaaccacagccagctctggctctaagcaatgagaagtgatactttgatagtggtgatgagtgcatgcatgtgcatgttctgccccatcctccctgcagaatgtctggtacatttgttcttagtaatgtcaagctgagagaatagcttgtttggttcttggcttaactggccataggaactcagttttacgagagctgtaggaaccatttaccaccacctggaaccggtaaatgcccaggccagaactttgaaagttagacgttttcctaaacaacaactgatttttgcctgttgacttgtgcttttttggcttggaaatgaggttgtgtagatgtggggaagtgtcctgaagagcagagaaaagactcattgaatggaactatgaatctggttcttgcttcatttgtgacagaaaatggatatttcatttagttctgagtcacctttggttacatttttcggaactaggctagttgtgttgattatagaaacacattgtttgtatgtgttcatgtatacttttattttgttcaatgctgggcaccaattcagggcctcgtgtatatccctgagacacctagttccctgggagattgtagacctaggattactttatcaagtatttccttctccggcctcttttctttctcttctcttctttctttactttttatgaagaattaagttgaccactctgatataattggaaggtaatatgttactaatgtatgtataatttggaaaaatattgtttacttttcagttgctataataagataccatgaccaagaaaacttattaagaaagtttatttggagctcacagtttcagagggttagagtccatgaccatcatggcagggagcatggcagcaggcaggcaggcagacaggcagcaggcaggcagcaggcaggcatggctttggagtagtagctatctgggaatggttttggaaaactcagtgcctgcccgcagtgacaccttctccagcaaggccacagcttctaatccttccaaacagttccaccaattggggaccaagtttccaaccatatgaacctgtgggggccattctcattgagattaccatgcctcggttgaaagttaagtagtttatcaggagacttcttggtttatttaaaaaaaaaaaaaaaaaaaaggcatccctgcagtctccctcacatgcttgctgttagaggcgctcactgattcaagaccacttaatctgaggtatcagttgttacaggaatgcactcttatgcatctcagcactcatacagcctccctctaaacatttatattttctcatataacctgagagagtggatagatattattattgttttttaaaatcttagtcacttccattgcttgtaaaacctgcagatttctgaaaataccaccttggtagaccagtgttgatggattttagttgctgaaaaatgcccatttcgctccctgtgaaaagagcaggtttgtgtttattcagtggctctgagatgagataattggtatttttatgatatgaatggggcctttgtgttttttgaatgttgtgaaacaaagctgtatttataaacacatttcaaaaaatataaatgacacttttttggtgaagatgttcactgaatagcaagaaagttcaaaaaagggagctttgttaacatttaataataatctaactgtttctgttgactatctcattgatgtttaatgagtacctgattttagaaacttttgtgttaaaaataatctttagataaggctattgtagaaaaatactttatgaggttaaacatttcttttacaagtttgtgttttaaaattattgacttgttttataatatataaaccaaataacagtagtatagtcacaaagatctctaagaaagccttgcttagtgccaaatacaagatgaagagaatactatggcccagctggtttagtataaatagtaaaaatttaatatgatttagtatgactagtataaagtattagacagaatccaaagactctttaggttttgaaaattaaggtggctaatttttatctttcttgtcacttccttttttcaagatttcaaacaaaaagattttacttactttaatcaacattttaaacctgggtttttttttaaagaggccaagcagcatttttttttaaagatttattttattatgtatataacattctgcctgaatatatgcctgcaggttagaagaaggcgccagatctctttgtagatggttatgagccatcatgtggttgctgggaattgaactcaggacctctagaagagcagtcagtgctcttaacatctgacccatctctctcgctctttttattttatgtgtatgagtatttacttgcatgcatattaatgcactatgcgtgtttacagtacccgagaaagccagaagagggcatttgatatcctggaaccagagttacagatgccattgaagcagggtgctctgccttagctagtgctcttaactgctgtgccatttcttcagaccctcttttcaagacgtttgtaggcttttagcagttatctgcttaatataacataattattgtagagaaagtgcattatatgtgttagtagtgggttttggttgacaagaagaaaatgccaagtttttaaattaattttaagtgcctacatgtaagttatagaacatttttttttttttttgttaattgcctttgaagacttacactatataaactagctataaactagtgctaaaacagctcagtggcatggagggcagaggttgtctgtctgccttcctgtaccgtcttttctcccttggttcagattcatgctcttcagctccttacggctcctcatgcacatgcgagtggtgcgtagctctgattaccgggaagcaatagctctgcaatttagctttttcagtgaacagcatacagctgaggagggaggactcttacaaagggcaatgttgagtctttatgagcttaggaggttatttggtttcctcaattacttgtaatatttggcatattgtagaacatgatgcaatttcccaatatataggacttaatgaagtcaaaaagtctatatcaaaacctgaaagcattatcagttcttccaagtgttagggtttcagttttaccaacttaattatctcctctttttagaaaagaaacaagagttgagataggatctggctcttgcctgatcacaggccctgtttttaatttttaaaattttttggggggttgggggagtttgtattctaaattctatccccttgtattccacctatccagtttataataaacgtgagcttatctaattagattaaagttaggtccaacgtcaagtgtatagcaagggccttcttctgtgtcatcaccgggtgagtggtaagaacttgtgtttgcttctgtgttgtcaccgggtgagtggcactaaggagcattaatacatccctgacctgaggagttctcctggagccctgccttccaatatagaagacttaggttttctctgcataggcctttccggaatgcaaattaacaccacagcattctgcttttggatgcccagttcctttcctcatgtgcaaagtatattcagttcataccagtagccctccagtagcccccaaagtcttaaatttttctagcatcaaccttaaaagttttagtttaaatccagcctcattttaatctattcaaattagctttatcctgggacaaatagacctctggaattgtgagcttgtgaaatcaaaataagttatgtgtgcctactatgtaattgtggggcagaacatttttattcacaaaggaaaagatgggcaagaaaacagaagtagctggttccaagtaaacctggaactcaacagagaacagcattaaatcttttttaacattaaaacaaaacctttcttacacacacctgtgcatgcatatgtgtgcttgagtgctgtgtatctgcttgtgtgcttgtgcgtgtgtgttgtgcgtgtgtgttgcgtgtgtgtgtgcttgtgtgcttgtgcgtgtgtggtgtgtgtatgtgtttccaggatggaactcaggtgatcagacttgcccagcaagttcttttattccctgagccattttcctggcccagcaatgttaactcttaaagatggagaggatgctctatgttctgactctatattttatcctctgaaagtactcaagaaatttctcatgtggggccatgctgggttcagctcatgcatgcagcaactttcacaggttagaatctcatgcatgcagttttttcatattaagcaatgccctagtagtgactctgtagtgtttttaccctagctgcaagtctctggaatctcaggttgttggcaatatctgttaacatttaggtgcaggtaggaaatgaggcccctcagcaagcctgttttctatggatggtaccaatatttgatgcttatgtctgtacagactgcagcctaaaccatgtttaggctctcttaagccttatttggaggatctgaggggagggtgtgtaccagagcacagggaacagacttgagatacccttgtttcttatttctgccagggaccctatcagaattgtcacatttctcccagctttctgagcacagacatttattgctgttttgaaaagtttgagagttttctctattgctgtcttcatctttagctttcactataatcacctgttcactccaaaaactgttttagttttattcaatctccagttgtaaaactgctcctcatttctgttgttttatgttgcaaataccctactgtcaggtactgatttcttccctcatagctctgctgctgctgtagcagaatacctgagactaagcagtatttgttattgttctggaggctgggaagtcaaagatcaaagtaccagtgtgtggcaagggctttctttctacatcatcaggtgcctagatgtaaggagagtgtgggcaggaggttagttgtatggcatcaatccttttagacattaatcttttcacatgagtggagcccttatggcctgactatttctctatagacctcagctcctgcacgtggatacattctagcatgggccttggtggacgtggactaagtcagaccaaacaagctcaataatagaattgactagtgaggccttgcatgttacattttctttgtggggtaataaaattttagtttagcttctttcatttatataagtctatcagattttctttttttaaagtcacattttggtaccggggctagctttgttcctgttaggaaagcattcaattactgtgttagacaccagtaacgtatcgtcctctaccatcctgtaaggagggtttttttttccattattgtcatgaaattatttataatgttgcattacctttttagttggggttaagttctagagtcatgctttccttccagtattagtgattgtgtttcattgaggtaagctttctttgttttgagataggtctcatgtagtcaaggatgactgtaagctcatgcttgctgttactaaggagagttgggttaacagctctcgctgctgtgacttaagttacggttatgtgtatatggtcatttctaacgttaatcattctgtggtgtgtatagatatttccttcatctctctttcctcctagcccccaaatttcctcttaatgtaggtaatgattgtctttatatcattggtcgtaaaataaaatttttttaaagatttatttatttattatatctaagtacactgtagctgtcttcagatgcaccagaagagggagtcagatctcattacggatggttgtgagccaccatgtggttgctgggatttgaactctggaccttcagaagagcagtggggtgctttttacccactgagccatctcaccagccctggtcgaaaaatttaacctttacatttaaggatagttttgctgggtttacaatctagattcttttttctttgttagcatttaaagatttctgaaaatattatattttggcttatttttttgtttttgtttttgttttttaacagtaactcagtagtgattctttgtatatagtcttttttatataagggatattttcttcttgtggcttctaaaagatttcatagttttctgtaatttgattatgagattcttatgtatatttgatggttatacttacacagatcttccactcccacccccacccccctgccaaaacagggtttctctgtatagccctgactgttgtggaactttccctgtagatcaggctggcctcaaaccatctaccactgcctttggagtactggggtgggataaaaggcatgtgccaccacttgaggggtgtgtgtagaggcagggggtggcctctaggtatctttaaatgcccttattccctatcctttttgctaggacagtaaggttctaatgtgggaattgtttctgaggtaacaaaaccttttttttcccctcaatgttttgccctacaattttaaaaacattatatcttttgtttttatttattttgagacaagctctctctcactgtcaaggtgaatgctatagtttggatttaaaaagatttgttattatttatatgcatgtgcttcaaaaacccatggcaggcctaagctaagctctacatcccctggactgaagcttacggtgtctctagaactctgtctacactgcagctgctttgctgctgctttgtcctgaggttggggtcagaggtgtgtcaggtgctgatattttcttctaccttgtccaatacagaaactttataacctagataatgttattttatttttcaaatcgcattttttggtcattttaaaagccctccccatttttcctttggctttttttttttttttttttttttaagtgagtggtttgcagtagttttctagtctttgtttagtaatcccaccttttaattttatgccaatttttatttacaggttttttttttttttttttttgcttattttttgtctttttgttttttggtcttgctaatgtacatagctagcaaatttttatttccttgcctttgggttttttttctaaatactaaaacgaacaaacaaacaaatgcttcattgtaaagtatagctttagactgctggtgtacaatttcaatcctctttccacctacttttctctctgtgaaaaggaaagccagagctgggcgtggtggcgcacacctttgatcccagcactcgggaggcagaggcaggcggatttctgagttcaaggccagcctggtctacaaagtgagttccaggacagccagggttatacagagaaactctgtctcgaaaaaccaaaaaaaaaaaaactttataatatctcatggcattattctctcctagtgtacctgagtctgtgtcagttggccattgtactttccctgctcttggtctaaaaagaaaaatgctattaacccaaaaggctattaattaagcttgaaggacagcctgcttttattggaagctgctttgcaggaaactctctaatggtatgtctaaaggcaaaccattttgaatccccagaaatagggaaagacagaactttggattctgggtgttgtgaatgttacactattgagtgtttagattttgttctttgtttaagactctagagcttttttctggcaggaaattcagtcattagagatcatttgtattccttcatggttgttttaaagcatttctcagggttaggtagtggttttcaacctgtgggtcgagattcccctgggggtcataacaaccctttcacctgggtcacctaagaccattggaaaacacagttatttacattatgattcataacagtagcaaaattgcagttatgatgtcgcaatgaaaatacttttatggttgatgttaccacaacataaagaactgtgctaaagggtcacagtgttaggaaggttgagaaacacagttctagggtaactttggttcttagaataatttagccatattagttacttggtgtaactaacactcttgagattctttagagtgctttggcttttcaacatttattgcacgtatatactgcttcagacttaaaatatctcacagttcctctttagttttagcctgctattgtggagtgtcaccatatacttgtaggatttgccattagtaacacacatgtgggttagccttgaagatgtctagagataacttctctaaatagcttccctttctcaaccagtgccctaggaattgcagctgctgttgcctcccagaaccccattctgttctgtttccttgggtcagagaccaccttgtgcatactgatctacagattatttccacacaggaaatgaaaatgatggtattgtttacattgtttctctttttatagttttatagtttgttttccagtgttggaaaagaggcatttgataggtgtttttcatttttctaattgcttttcaggggaaggctaatttagtgccaattactgaaattggcttaaatcagaaatcttcttttcttgttattagaaaggtaaatttggctgaaaaactatatatgatagtaagaaaggaatcatgatacttgaatgtgggcagtaccaatgagccaggacagacacctactgtctggttaggtagtacattgcagtgtaagttatgttcttgggggatcgtggtgagagactgcataaaccatcaggatctgtaacgacaccataactcccaaacaccagaaaggttctacctttcttcccacactttcaagaacagaaagcctagaatatgagaatttcttaacttcatagcagtttttgcataagattcagttttaaacaaacaaaatatgaacagatgggattcctgagctgtcctgataagtaaaagtgattaccaatgccatagtaagtacttgtggtgttttgtgtgcatgcagggaggtgaagtcttgtttgctcgggtgcagactccttagagtgagtgaggcctgaagtgacagcagagaacagttctcaggcctctgttgtagaacatccccaacttcatccttgctgttgattcacccacctttgctgttatcaaaattcttcccacagagaaactgcagcctgtaagaaacagatgaaagccaaagtcaggttacttttaactgattttctttgtttgattctcttgaatccagtgaggttttaaaagagaaagaatataattttatgatatctgtttcttctttgtgacacaggacaggtctcatgtatctcaggctggcttcagacttgctgtgtggctgagtaagaccttgaacttctgattctcctttctcaactgctaggactacaagcctgatttaagtagtgctaaagctcaaacccagagttttctgcttagtaggacagcactctaagttacatccctaactccaagcttaagatttctacaagagatcatgttatagcactctgaaaaggcaaaaaaacaattgttaacttggagtagtacggctgaaatctcacattttatccttagtcattttattaaattacttttaagtttttccttaggttttcaggtgttctcagctacttatctcaatagatgttgcagtagcctgtgctctaatgaagtgcaatttacatatatatatcttaatattgttatgaatatgtattatacaatttaaatctcaataatttaaatagaagttttaccaaaaattatgatccagttttctatttatcactaaaatgtaaatttctcttttatctctttgttttatttagtaattattcaaagcataaagaattcagtaggtttatattttaattttattattattattatttgggttttctagacagggtttctttgtgtaccctggctgtcttggaactcactctgtagaccaggctggccttgaactcagaaatccgcctgcctctgcctcccaagtgctgggattaaaggcggcaccagcaccgcccggctggtttatatttttgatttatttttggctgtaaatgttatatgtaaaactctgtatgatgtaaaaaaaaggatttgaaactcatgcttgagtgaattaaaagtgctttaaaataaattatttatttttattttatatatcttgagtgttttgccttcatgtgtgtatgtgtatcatgtgtatgcttgagtgttttgccttcatgtgtgtatgtgtatcacgtgtatgcttgatgccagtggggcccggaaaaggttgtcatatcatcagaactggagtcacacacagttttaagctgccatgtgggtgttgggagcttaacctgggtcctctaggaacagccagtgcctttaaccgcttagacatcttttcagccctaaaagtgctgtatttagacaaggatttaataatttctgtagcatatttacacatggcatttcttagtaaagaaaccaagataagaaactattgtatgaaaaagttttctaaaagttgagttacaggctttatgtaaccagtgttcattctgcatgttttgtaatagcaggttctcttctaagtgttagtgtgtaaaggtgacagggacatggtccttctgtaggattacttttaggagattttatgtatcctgggtggtggtataaagtccattcagtggtgaatcatgattaaaaaagaaaagaaaacaaaaaaccaggagggtttgaaagctataactttagtagttaaacttagctgcttttagtattttttgtttgttttttggtttggtgtttgtttgtttgttttgtttgttttgtttttttttgtgacttggtgtgaaaatgtttgagtttgtacatcagatttctagtggatttggttattttgataatggtattcaccatgggttaaacactggtctggattttcccatattagattatgccttgttgttgttgtttgtagtctttggagtcattggcctttaatttttattagatagcctcttttaaagaaagtagcttaattgggaatggaagtaatctatctaatcttctaaccatactgaggaaaatatttcagaaacacacaaaaaagttttggattattattttgttaataacaattagttcaaaccacttgtataagaagtacttccaggtttctcatagttatggtccagtgcagatgtggagctcagatatcttcccatttctttcttccactgaaattctagtaattgttcagaatagtagtgtgagtagcgtgactcagggaggaagttgcatgggcattcctaatgaagtggaaagtgactccattgtatgtgtttaaatgggttgcagtatcccatgtaccatctagtggtttttataggagaatgctcacagtttgtacattgtgagaacattccttaaagacaggaaacatttctgaagcagatttaatttagaatgatatgtcaaggccggttttttaaattatacatttgttgtctcaaaataactattaataacaaaagataattcaacatttatgtaactttttactttagcttttgttttctaggcacacttgggtcataaaatgacttttcagacttttaaggaagtctttgcttttattttaatagaacttgatttttagattttattgttatatttacttttaacttagagactttgaatatatagaaaacacaccttgctttgctatagaatgtggaatggtataagttgaatagaggtgaaaagcagttttcttaagaaagaggaaacatacttgatctctgcatatgtcagttgttcattcatatatcttttactttggggctgtgcatagaacctagagccttctgcactctggcaagtgctctttgtctcttatctccaaggtacaaattctagtcccactctccttttgttttctttagggcttcattgctgtgaagagacaccatgaccaaggcaaacattcaattagggctacggtttcagaggtttagtccattatcatgacagaaagcatggcaacatgcaggcagacatggtgctggagaagccatagatcagacagcagcatgagactatcttctgcaggcagtcaggaggagcctctgattctacactggcggagcttagagatttatggcctcaaagcccatctccacagtgacacacttcctccaataaggccataccttctaatagtgctacttcctacgggccaagcattccaaaacatgagtctactggagggggtggggagcagacctagtcaaaccacttcatttttatatttggaaacagggtcttaagttactcaagctggccttgatctcagtgtagtccaggcaggtcttgaacttggggtcttcctgcttcagcctcctctggtgtataacatgtattaccaggcctgtcttatttatcccctttacattttgttcccaggaacagtttagttttagatagggtttagctttgttgcctttgactaggccattgagtccttagcatgtgtttttttttttttttttttttggttttgtttttaggtgaaaataaaagggcagggagcctttaaaatcaaggtacagactatttttattttgtaggaagagtattttgagatctaaaaaaagggggaaaatctttgcttaagtttgttgatctttggctttcatatcttaaaactgctttgtaacaagaaagattcctagcacaatttccccttactttttggtggatgcagctgtttatttttaaatagtcttggctctgacttgtcagatttaatttgatattatatattatagcaagtaaaaaattggtgtgcttgtggaaggatatgacctgtgcttcagaggagttggagtttggacagccttcatggatgctatcatagggtgctactgatttagttcccaggagaacatgagattgccatggcaacagaggctctttgaaggtagaaatcctggcagagtggttggagcttttgaagtgctgggtgtgttgataggaaaggatccagacagcaataagcacacaagtgtaggccagaagtcaaggaaaataagcatttggtttttagcttaacttgaggacaagcaccttttaagttttcctctcaattctggtgttccttcaaaataaatatttatatgagatttcaccttcacttgtatgttgtttcaagaaaaagtttctaggtatgtatcatgtatataaagttagcatggtggtatgtattttgttattgttggcttctgatattaaagataaattgcaagttatcatttctaaaatttagtattttttaaaactagtgataaacaaacaaaatatacttttaatttcttatctacatatggttgtcaacatccttgtactagtacactcagaactttatttttccacactgaatttatctttttttttttttttttttttaaagatttatttatttattatatgtaagtacactgtagctgtcttcagacactccagaagagggcatcagatctcattacgggtggttgtgagccaccatgtggttgctgggatttgaactttggaccttcggaagagcagtcgggtgctcttacccactgagccatctcaccagccctgaatttatctttaattgtatttctgctctgtgattcttctgcctgtttctgggccattacttaaatgaggcttctgcttagcataattttatttttactgcgtctataaatgctgttaggtttcatctttgttactaaactttgcttcagagatcttatcctcaactttttaagacatctatttatttatttttactttatgtgtatgtgtgagtgcctgcatgtgtctgtgtgcaccacatgcttgctgatttggtttccttggaagctgaaagaaggcattggcttcctggaactggagtaacagggggctgtgctacctggtgcgggtgcttggaactgaacctgtaccccctgcaatagcagcaagttgtcttaactactgagccatctctccagttctccttaccaaaaaattttttattaaaatttacacactgaatcacatagagctttgtagtattttacactttttttttttttttaagatgctaaatgttggtcttaattactttggaataagtcattcttgactatgtggttaggatgtagtaaaactagttgttgaatgtctcagttttaaatgttaatgaaaaaaaacaaacaatatattattttacttttagtgtaatatatctaagcagtgtgaactcaatttagtatgctataagatttttgtcccagaattgataacttgttacaattgatacagcaaataatcttagattgaaagatgaagagtcataaataactagtaccattctagatgcttagcagaaaagtttatttagtatacccagtagaagttgtcagggaagagtagtcagtgcttactgcttagctgccattggtgaggaggacactggctcttactgtgctcacataactcagtagatgggccaactttttcagatgttcattttattattaaccttttaaaatttcttttaagaagtaaatgctggaaatttactgagaatttctttgctcgtaagtgctcaaattgatctataatttttccctcccttcctccttcccatccatgtatgtgtgtttgtgtgtgtatgtatgtatgtatctatctattatgtatgaaaatgcaaaaggaatatttaaattctcctgttagagttttgagagtggggataaggttggtcagtaagaaatacctgtgaagatacatcttggtagtggatagaacatggcttcctaatttagtgatttctatgaagttcctgaaattcttagttcctgtttgagcctttctttagtgagctgcttcccattctgcgtttgtagttctgccgagtctattgagtccctggtcaaagagagctgtgtctgctgaggactggatgtgctacttcctagcttcaggcctcttagtttgaacatgaagtgttcccagaagctcacttgtttgaacatttgaaaaccaggtggtggttcttctttgggaggttgtggcgtgttgaagagatggagggtggttggcagaatgtgtcaggaagagagtaccattgaaggttatagttgcttctggttctggcctacatgatctccattgtacctcctcccccccccagccccccggccccgcctttatgatagacgaattctctctgaaactgagccaaataaatcttactcaattaaatgggttttgtctggtgtttgtcataatgtcatgaaaaggaatttaagtagttttggtttttttgttagtttatacatgtaaccatggaaccaaatttaaagaagtagggagttgattagaatttggtataggttcatgaaaatttatcaaaggagagagtatgtactatgctaaagatacagtgtaggttactgccccaagctttcatgtcatttttaatagaaaaaagtattagagataaagtgtcaattatttttgtttctctgtgatactggtgacttaattcagggctaggtaaagcactgtgtcaacagagctctagtcctgggacttccctaccctcttttggtactaggctttgaacccagggccttgtgcatggtaggctggtgttgtataggtgaggcacatctttaacccaaacatcagaaatcccgttctttgaggtctttctacaggtacttgaacttttaaaccatgatggaattgttgaaaaagtgggagtgttttatgccagtagagtgaataaaagtgttttattaaatagataaaatatcaagcagtttaactactaactggtgaactaattggacataattttgatctgtttgtctcttgttttgatttttcttggaaatagtgaaaaacttggcttcttttattttccttgtggtccatttacactaaccttataacaccagcttgaggagtaaaattgcttttcaggtcattttaatacaggtggggactctggaagtgagtttcattttccttgggtggggtttggagggtatgcagagagggctttgccataaatcccaagctggcattgaactttaagtgattttcctgaagcttcctgagtgctgggatcataggtgtgagcagccatgtctggcaaattttccttttactcataggtaaatgaagggatattagattgaatggcagttgacttctatcttgtgataactgtgactctatgactgaagaaattgtggaaagataaagttagattttggatattgaagttagtgttgatgggtattgggcctacacacacaaacacacacacacacacacaaacaacaggggggctggagagagggctcagcagttaagaacactgactactcttccaaaggtcctgagttcaaatcccagcaaccacatggtggctcacaaccatctataataagatctgatgccctcttccgaggtgtctgaagacagctacagtgtacttacatataacaaataaataataaatcttttaaaaaaaaccaacagtgttaccattgattgagaataggacagctaaataaggagcacagtatgtgttgagctttgagagataagatgtagagaataactctttgacttgagattcagcaggagatagttgccaagaattagatgatactcttttaaaagatttatttatgtattttatgtatatgagtgctctatgtgcacatatgcctgcatgctaaaagagggcaagatggttgtaaattactgtatggttgctggttattgaactcaggacctctaaaggagtagccagtgctcttaactactgaggcatctctccagcccttgaatttccggtattcttttctgagatgcttaagaagatttgaactggtggtagccatatggaagctgaaaataagcctggagtcagagaactcagggtccaactttgggcccaaaataggacaatttatttgagcacgaagaaagatgacttcttcagtggtttgaaattcttgtgtttaaatatgtgagttcatagtgactcaaaagatgtctgaccatactggtggagttaatgctcatgagataataattatttttactagaggtactaaaaggcaaaaattaagtgtttttccagactctttaagaagtgaaccattgggcagctaaatagttggtaaggagtggtttccttttatagaagtagtctagctgtcacttgggaaaggaacgatagacttatagttttgtatttaagcctcaataattaacaagtgtaggtattgagcatcgtaaatacaacgctgctagaagaaagccagacagctgtttgtttaaaggcaagttcacccatgatatatccctgttcagccctccaggaaacacagaagaggaaagtgttaaataaagttttagtcagaaaaattcagattgggaaagctttgcaggataaacaagtaggttctccttgtctcagaatctcagtagaaaaatgtgagtagccatgcttacagggccagtggaaactggatgtagggctagccaatcctaaatccaggaagacttaggattaagttgagatctttgatttaattaccactacaaagaccctatttccaaataaggccacattaacagatataacaggtggttagatcttggatatagtttttttcttctatcattttaaggaacaattcaactatcagcagtgctataaattaaaaggtatagttgtcatggcagggtcttgtctttatttggatcctgatataaactaataggttgtaagataaaaacagtctgagatgctgtgcatgtgaatactggatatgtagtgaagtgtttttgttaacttttctagttgtgactgttgtagttacttttaaaacagttgtggagaagcactatttgaagttgtcatcagtgatttagtgaagggtctcttctgaagaagagaccatggacaatagcccatacaatttgcagtctgtttctgtaagtgaaggtttactggatcacagccatgcctgcttgtttatatgtggcttgtggttttggtaatacagagttggagatacataattggggcacaaacactttgcagaaagccctaaaataatactttctggagcactacaaaaacttgctgactcctgatacagatgaaatgtaggatcatgagttgacaatagttaaagctatttgttttatttattttttcataaaatattaaagtttaacctaggaaaacctaaggaacattttgtttcttacaagttttaaacgaataacaacgagatgctaacagtttttaaatcaaggtaatgagtttatgaagttccttattttgttcttacttatttggctgaatgtttgtaattttaaagctaagctatatcatgttatgaatcactgtccaagtaggaaagcttttgccatctgacagcaaagtgcaagctttgatatttaaaccataagaagcttctataaatcatcaaaaatatgactgttagaaaaatttggaaagaatatgtagtatttgtcatagaaagccaactggctaaggtgcgaagaggaaaaatggtaaaaattagcacaattaaaaatggttaattaagggctggagagatggctcagtgcttaagagcactggctgctcttccagaggtcctgagttcaaatcccagcaaccacatggtggctcacaaccatctgtaatgggattggatgccctcttctggtgtgtctgaagacattcaataaacaaatattttaaaaaactgctgtttctaaaaaagtgctcaattaaaaacttgaacactttgtagtttgttgttttgtgttgcttggctgctaaaatttttttgagtaattgaggttggtttgtaaaattcaacaataggtaatagtaaccaagcttattggtaactgtcagtgaagtttctgctgcatgtgtgtgcttactttcatgcttgctgttactggatgtctgtatagagattgtctaagtagtttgtgcatcatggttactcagaggctgcggcactctgtcactagggtttttgatttatggagtttcaggtgaggcagagaattgactatgtttcttgataagtttctccatgatcgtttgttgtggtctgaaaggacaacacaatgataatcactgcctagtaattaggagaatgacagaataaatcccgcgcacccttatgactcaggtctgtctttgatacatagagatcctttaccatttggccatgaccacttgtgtatggatttaaagaaggcattgtttaaagaaacttttgagaaccttcagtcttatgtttgttaacgtgaataacattgactcatagataataattctgaataaaagtggctgctttatatgctatactatttatattgatcaaaaccatggtaactgaaattataaaaatagatatttaaaaattggtcctacttatagaattaaatacatgaaactagttttggtaaaattatgtttaggagtcaagtaatggaatcagttgtggtttagaaatcttatagttcttgcttatttaagtaaccttttctttttaatacccaacaatactaattaaatattaaaaataaaatatgttgtctattcccattaagaatagtgttcccttaggcttcattgggccttcaggaaacataggccagtactgcttgatagactttttccattgatgaagagctgttttaaagtctgtctgtcaaataaatgttgctgttgagtgcatgaaatgtcactaatgtgactgaactgaattttaattatttaaaatttttgtttgactaggcacacttggctggaggccacctcattggacagctaggcagtttacaacatgacttacatcttgggttattaatatattaatgcctcttaaaaagaatatgcagtgtttggttgggtgatgttttatttcggtcactcagttttgattgttgtcttgtttgctttgactaatactttttagtgatagcattttaatttactttcttatgctgtatatgctaaaatctctttagggtcagctgatactggatcaaaatttattgtcaggaatgcctagatttcactaatttttttcttgaaattgtcatataattctttttttgtatgtcagattttttcatttctcttgaatttttttttaaaaataattctttcactgatctgtacttttctttctttcctcctttcttcttccatttctctctgctcctttcccttccctctcccctagtcttcctgctcctctactcctcaccactctgcttcccttccctcttcttcctctccctccccgtgtgctaggtaagtgttttataattgatctattcttttatatactgagttaaccctaacccttttagtaataattttattttgagcaaaattttgctaagtttcccagtctgatatcagacttgtaatccgagatgggaatatagacgtttgccaccacagctgcctgtcattgactttttgagcttcccaattagactctctctctaattttttaaagaattgatttagcttttatcttgagtcatttagtattgcttgcttgctgctttgaaccttgcattcctgagagccagggaataatagaggaaatacatacatgctcagaaagtaggagaggcaagcattctgttgtgagcatatttggaagtgtttttaggagacataagctgtagcaatgggagtaggaaagtatgtcaacaggaaaaacagtgaccagtcaaagacatttatggttcttcatgctagtgtagcattcctttaccagctcagccatctctcaggttcctacagtctcttgataaggtacttatgtgtctgccttttattcctgctcttttttattcagacttttaaaatgtcttagtttgtccaaccaaatacagagattctccagtctaagaagcatttctgggttagcattcttactgtaacattcaagcatttggtgactaatgacttaatgatttgactagtttcaggatgatcacctaagcatgtctcatccagttgctggggttatgaaagtgttcatttgtaacaaatagaaacatgattgcttaggtatgctcattcaaccagactgtgagtggcttttgtaccaggaggcattcttcagaaatagctaaatgggttctcagtgccattggttccattactttcattttcattaatagctagccctttttttgagtacttataaataaatatacaatgttgtagagcaatgctttgtagatgactagaaagtaggtatattgttgtttctaaggagttcatagtctgagcaacaggagccatgtgcagcagcagtgtattattatagtgataagtaattctgatgtaagcagatggcttaatagtcgaaccatttaagggctcagagctgtatgtccatccctcagacaaactttgtggctttgagtcagttttataaaataagttagtaagtaagtaagtaaataaataaataaataaatgtaattctttaaaaggagaatggcatggagctttttggtaatcatgtctggaataaaaatttgaatgaatagcaaaaatactgtggttgtattggttgataattcactgatgttctaatgtatagcagacccatagtttatgaagattgtttttctgttcttccacctagaatgatcatcttttcttaagacctgatcttgttttgtttttatgtagataagaattttggttttgttttctgctgtattgcctcctttaaaactgctcatgtaatagaatatttgactttttggtggtgcttgtattcattctttcatttttctgtattttaaagtttctctgaatttaattacaattggactttgctacagatatttgaagcaagaattttatctgttttctttacatacattatttgtaaatagttgggtttattttaaagttttgcactgttgaaaaatctgtactaatacaactttatatcagcaatgtcataatatttaagtgattaatctctagaataaatatgttacttgtgtgaacatgaacaaaaaagttaaacttttcaattatatattttgtatagaagtcactttgcttctttgaagttaattttgttagtgtatctgaaaatgatgacaattttgtttcctagttaagcaggcacatgcttttggccaggagtcatttcatattaaatattcagttacactgggatgtcagggtgagtgcctactttgtttttaattggcactttcattaagatagccatcatccaaggcagctcttcagaaaggcaattgacaggatataactgttcgtgtggtgatttggaagacagcatttgtattttcagattttattttcactattttaaaaacattatgtgctacagacagacacaggaacaagcacatacaccccaaattagaaaatatcaaagataagattaagccaccatgttcctgcttcatataagatggcaccattaatgctttagtgtatatcttttcaaatgtatgtgtatgtatacttgtgtttctttaccagaattataacatactactgttgttatactaacataactaccagatactacttagtatctggtttttgttttttgaagacaggatctcagtatttcttgactggcctgtaactcacagagattcacttgcctctgtctcctaggtgctgggattaaagattactccacccctcttactttacttgttttatttgttttgttttgttgttgttgttttttttaattaggtatttatttcatttacatttccaatgctatcccaaaagttccccacatgctcccccacccacccactcccacttcttggccctggcattcccctgtactgaggcagatagtgtttgcatgaccaatgggcctctctttccactgatggccgactaggccatcttctggttcatatgcagctagagacacgagctctggggagtactgggtagttcatattgttgttccacctatagggttgcagatccctttagctccttgtgtactttctctagctcctccgttgggggccctgtgatccctccaatagctgactgccagcatccacttctgggtttgctaggccccggcatagtctcacaagagacagctatatctgggtcctttcagcaaaatcttgctagtgtatgcaatggtgtcagcgtttggaagctgattatgggatggatccctggatgttgcagtctctagatggtccatcctttcgtctcagctccaaactgtgtctttgtaactccttccatgggtgttttgttcccaattctaagaaggggcaaagtatccacactttggtcttcgttcttcttgagtttcatgtgtttagcaaattatatcttatatcttggttattctaagtttctgggctaatatccacttaccagtgagtatatattgtgtgagttcttttgtgattgggttacctctctcaggatgatgccttccaggtccatccatttgcctagaaatttcataaattcattctttttaatagctcagtagtactccattgtgtaaatgtaccatattttctgtatccattcctctgttgagaggcatctgggttctttccagcttctggctattataaataaggctgctatgaacatagtggagcatgtgtccttcttaccagttggaacatcttctggatatatgcccaggagaggtattgcgggatcctccggtagtactatgtccaattttctgaggaaccgccagactgatttccagaaagctaccaatttctgcttttctatgccaacagattttcatcttatatataccgctgccaaaacttaaacattgtattagtcacgtttttcattaccgagacaaaaattcctaagagaaacaaagtgaggaatttatattggctcttttgggagggtccactccatcaaggtggtggaatcttggcagaatcagctgccatcttcttgttcatatgcatcataccttgacagatcaggaagctgagaaccacagggtcagcccttaaaggcacagtgatccacttctaccaaagtccccacctcagtcaggttctacacactttgccaagtggtgcctccagctgtagaacaactgctcaaacacgtttgagtgtgagggagctgtttacatttatgttgtcagttttctggggttcgcatttgcaattgttctgtttaagcattccttgatgacttgtggcatttaataataccactctaaagctgtttatctctgacatgtctcctgctcatgacaatgacattaggtttttttttttttgtgtgtgtgtgttttactgcatatgcctgtgttttggggatgttgacagaggcagatttgtttagttgcctcccattggtgtcatttagctcatttttgtatgtcttaaagtttaataagcagttaaaatatgtattgtccctgctgtaataacctctcaacctaacagtgtgataattgtaaatgtttaacaattttagcctgtgtcttatgtaaaaactggaagagaaataaaggagcagatgtgtgtgtgtgctcacctttgtgtggaggtcagcagacaaccttgagcatcattccttaggtgccatccatgttttgtttctgagacagaatctcacgttggctggagcttatcaagtaggcgaggcaggatgattggaactaaaagctgtgtcactatgccattctatctatctatctatctatctatctatctatctatctatctatctatcttttaaatgtgtggattgaactcatatttttacctaacattaatttttgaaaagataaaacgatacatttagatataatgaatctatataaacaattatacattaacatatttatattagttaaatatgaactttcataggtcatggtttgaaatttacatcatcatgtgcttcagttttgaaaaactcatggttggtagtataaaatattttagtaattaattaaaggtgcatttggatttttatattaatattttgtatttgaattttattgcttatatatctttatttttgtaattgggaatgtatttgtagtctgtgtcaaataattttttaaaccacaagtaatctataaattatcaaaatgtaaaaaatagaaatgtatgtatctaaaaagtattatataaactttagtgtttatgtttttaaaaatcttattgggggattacagtttgcaatttgacttttgtaggaaaaaagtcagctgggatactttaaatcgaaacagtaacgaactttgtaaacaggtgggctacaaagatggttcagtggttaagagtgtttgttgctcttgcgttttgattaccaaggcccacatagtgactaataactccatctccagttccagaggcacctgacaccttctgacctctgggatcacttcatgcacatggtaaacacaatacatccaggcagacattcatgtaataaaataaatctaaaaattttaaaagaaatttctgaacagatgtcattgacctttgacatcatagaatattctgttgttttataaagtgagagataaagaatagctgtatggcagagtgtcttgtctgctaacacttcttgctgctttataacccttttcacccatgtccagttatcctgcatttattgaacatcatgtatttacatttgaatatctttagtgatttggattaactttaagttgcataatgtttatgtagtaatgggaattaaaaaaaaaattaaaggcatggtcttattctgtagaccagactggcttcaagctttgatttcacttctcagcctcccaaatactagttttatagacatgtactaccataattggcacaaaaatgtcttttttttttttttttttttttttttttttggtttttcgagacagggtttctctgtatggcactggctgtcttggaactcactttgtagaccaggctggcctcaaactcagaaatccgcctgcctctgcctcccgagtgctgggaataaaggcgtgcgccaccacgcctggccttaaatttttttttttttagattgtatttaatacacatcaggattaaaagtctaaataatcaatagaaaacttctgatttctgtggcagcatagatgaacccaaaggtgttaggtgaaatgtatcagacattgaaagatatatgctgtacagtctcatatatagacacataaaaattgaactcacagactcaggtaggatggcaattattattaaagggagtagaggttgggaagattttggtcaaaggtgtgtgttaataacaataaatacagttcattttgttttaaaaaattgactatcatgtaattttttaaccataaaaagttaaatatctaaggtaaaacctgtgttaattagctctatttaatcctgtactatataggtattgtaaaaacatactgttcatgaatatctgtgctcttaccacgtgggaggtagagaaaggagggttaggacttcattgctagccttggctgcaaagtaagattgaggccagcctaggctacacaacacagtcttaaaaatgctcccctcaattactacccctcaaaaccaaaacaaactaaaccatgttggtaataatagcgacatatcatttttatcggctactattaacaaacgaagttttctttttagtaagttgtcttatttctgtattatttttactgtggaactatgttgatttttttaaaatatctttaaatatttcaagttttaaaaacattaatgacaatttattaaaatcactagacaagttttaagaaaatgtgttttaacatattatgtgacatacaataaaatacttattttgtatatgtggtatatgtataggtatgtttttgttcagtgcatgcccatatacataaagttcagggtttgacaaggtcttttctttaattgctttgcactttagtttttgcgacatggcttcttactgtgctttggctagactggatgactagcaagctctaggaattcacctgtctcctcatccccggtcctggagttacacatatgtgccacagaacccagcttttgacataggagctgtggtcaaactcagattcttatgtttatgtgttagacactttgactactgagccgtcttcctagccctgacatcagtttaataaataaataaggttatttacctcctctggtttggaagtaattttcatttaatacttttcaaatttctagtagtttatctgactgttccattaaatctctagtataagccttgcaaggcacctagtgttctgaacataaccatctcacagttacacattcatcattcatttgtagtacgagttcttttattcctgctgctaaacaaaagtttttccccctaaggttttaaaaagtgatcattatcaaaatatctaaatgcatttcagatttgagttacatttcacttattccttcaatattagtgaaatatatatatttaaacaaatcttagatttttttcttagttttatgatatattagcattatgaagtataagaatgcctgtactttagactggcatggctttatttagaggctaagtggataaacagtggtttcaagtgaatgtgctagtatgtagatacttagaagaatctctgacagatatacgttgtaggcaaacccaaggctatagtccagtgggaagtgcaaatcagaaagtgttgaaataccaattcgtatccactttctgcctttgtctgtctgtctgtctgtctcttctccttcctcttattttaattaaatgtgattaactgggatgaaaacctataaagcttctctttgatgcattttaaagcaacacctgttctaaaaaggtaaaaaccccaaattcagtaagcactcatttctagatctatgagggttttcagagagcattgagttatgacttttttgcccttaaggaaatagtgttccattttagaggacaggattaatagttatggggataataaatcaagattcaggagttttgagtgactgatacagggttaaagattcggtgaggaggagaggtaagcattttcagttaatatatagttttgaatttaagcttcaagggaaatgatacaagatttattctacttattttaggtaagtacttttttaggattacttctaaattttatgctcgttctttagattcctaaagagtataaaattatttttaaaggctattgttaatgtcttatgaataaggagcacctcaaatgacttaataaaatttcactaaaaaatttggctgctggaaatgtagctcagcaatacagtatttgcctagaatatactaggttctgggttcaaaccacagtgccttcttctgtcttagtctgtgttctattctgtggagagataccatgcccacaacagctcttataaaagaaaacatttaactggtgctggcttacagtttcagaggtttaatctattattgtcatggcgggaagcatggtggcgcataaacaaacatggtgctggagaggtagctggagttctacaccaaatctgccagcagcagcaaggaagagagacaccaggcttctgaaaaccccaaacccacccccagtgacaaacttcttccagcaaggccacacctcttaatccttctcaagtaatgtcactcactggtgaactagcattcaaatacatggtgatgttcactggtcggcaaatatatggcttgttcactggtgaacaagcattcagatttataaatcattcttattcagccccaaacatagcattataaaaacaaatcaaccagcacttaggaggcagaggcaggtgaatttctgagttcgaggccagcctggtcaacagaatgagttccaggacagccaatacacagagaaaccctgtcttgaaaaatcaaaacaaaacaaacaaaaaacccaaatcaaaacagatttatagctttcccttttgcatgtttatatgcatgtgtaagcatgaatatgtgtatgtgtatacatgtcttacacacatataaacatacatatatatatatatatactcaatacaaacatataacagcatggcttcaattcatttgaaatttaatgctgttgaaaattaaggtgaggggatgcttttaaatattctaaaagagtatttgattcccttttgcctctcccttctttcttttgccttttgggttctagacagtgtaaagagagtaaggtctcaccagactggaacctgtagtttgttgcccttaacacttcccagcctgcagaaatatgagcaaatgagtttctgtttataaatatcctgtctgatactcttacagaagcacagaactagctaggacattctttgcattctgtgcttgctacccctgtctttccctgattccttggagttagcattccctctactcccatgtctagctgccttcactgttaccacccatggaattctcagtggagctggtctccagtttcatgttttattcactctgttggctgttcactcatgtcactgtcctttcacatttatgctttcttttttctttgttttattttgagacagggtttctctgtgtagactaggctggactccgagtcagagatccgcttccctcatttttttattagtggtggcattaaaggcatgtattacccctggctacatttataattttcttgaagacatatatttttaaaaagatttatttatttgttttatgtatgtgaatacactgtcgctgtcttcagacacatcagaaaaaggcatcagatccaattacagatggttgtgccaccatgtggttgctgggaattaaattcaggacctttggaagagcagcagtgttcttaacctctcagtcaccaagacagattaaaaaacattatttattttatgtgcattggtgttttctctgcatgtgtctttttgaaggtgtcagattccctagagctggagttacagacagttgtgaacggccatgtgggtgctggaattgaactccaggtcttctgcaaaagtagtcagtgatcttcacccctgagccatttctttagttcccttgaagatgggatttattttaattttttagcatagatgaatatatgtaaatgaatcatttcatgttacacacatagtaggtacttggttggtaaattactaaattacctaaagttttatacttaagaatagaagtttggccaggcatggtggtacacgcctttaatcccagcattcgggaggcagaggcaggcggatttctgagttcgatgccagcctggtctacaaagtgagtgccaggacagccagggctaaacagagaaaccctgtctcgaaaaaataaatacaaccaaaaaaccaaaaaaaccaaaccaaacaaacaaaaaacccaaccaaccaaccaatcaaccaaaaagaatagaagtttgtttttgacatttgttggaatgttaggttttcattttcaaagctttgtctagatttgttgcaatagttatttccaacaataaatatagacctaatgattatttagaacacaaattcataaggacaggagtgtagttcctttggtagagtccttgtatagtatattatcctcaggacagcataaactgagtattgtgtggtgtaattccagcagtagggaagtaagctggaacatcaaaagttcaaagttatcctcacctacattttgagtttgaggccagcctggaccacagcaagagatcttgtctaatttaaacaaatgaatacagcctagaaaagtaacttaccatgacagagtttattaaaataatgaacttggagcacaaggtactttgcagaaagattgtgccttaggccattttatgtaccataatatattattttaaactagtaattgataaaacacagaaggtttctaggcattcagggttgcagcatttggttgctcattccaagatggtgttttttcctttgtgttctttgagttggagatgaagtaccagagtctcatctgacacagcaggggaggagaatggacccaccttgtaggcctttatgtacaatgactgcaattcattcctggtacttggggaactcccataaccttatggcttctattttggccttacctgttgcttggagcttcaagcaagaggtttggaaagtacaaaatgatgtaaacagtagtacaggtttattgattctatttttagatggaatttttaatttcatgtaacagatatttgctgaatatctttattagctgggagactgaaataggcttgaaagatacatttatcttccaatgatggaagatgaacaagacacattagcacatcgaactattaattacaaggattgaaaaaaataaagtgaagctgaataattagaaaaattatttagttgataaaacagtttattagacaattgaattttacgtccaatgtagttttcttgttaaaaacaaggtttagaatattgctctagaaatgatagttagattcaaatttcttttgatttttttataaatatagaaaagcttataaagtcagcagcttattgagctggagctgagttaccatcagtgagtttgtaacactctgctctctccttcactcactattgcaaatgaagtgtagatatttatttagctttgacatagactggcagcaaaccaaccaaccaagctaaaataaacaaaacaaaaaaccaccactaccaacagaaaatcatataaatgcttaatgtatctgcatttggattaatagagcatacctcttcaaggaatgtgttctttgttgaaataaatggaatcccaactagtggtttaaaatcatgttttacatctatctgtagggaaaagcttttcatcaaatttaaaaagcaactgaaattaaaaagtagataaatatttttgattactttttagttgctcttggcatctacatggggtagatttatagtgagattagtagctagaggattatattgtgtataaaggacacatgaccaattttaaagaacagtgggggaaaatacccacggctgttattagaagtagttgtagcaatatttgtagtacagaaggacttgtaaaattgaagattattggcttgagtattctttgaaccttgatatattttcagccctggcttattacctctgtgtagattaaaccttttttagaaaagagagattaaacagctttaaagagagaagttgaaggcatgtacctcattgtgagtctttgttttatgattgaatgataatatactagggaaatatagatacaaaaagaaagaggtatagtttgattcaaattttggtattggatttgtccttaaatgtattttttaattctaaaaagctatattagtggtatatactacctagtatataacattccctaagtactcagtggcagaaccctcaaatcaagggtatcaatattcatgaattgaaacatttatatatatattaattatataacattaatatataatatatatataatcactgggataaataaggtctataattattctcatttcagttcagatatgattttacttccatataagttaagtaaacttttatttatttgtttgtttgtttgatttttgtttttttgagacagggtttctctgtatagccctggatgtcctggaactcactttgtagaccaggctggcctcgaactcagaaatctgcctgcctcccaaaatgctgagattaaggtgtgcgtcaccatgtccagtttattttgttttttaattaatttttttgagattttgttatgtatatcaagtctgtatttgaactcacgaccttttgttatgacttccaaggtgtgggattaaaggcttacaccacactagctttccctttttaaattgacctaaagatggatagaagttacttctgtgaaaagaggaagtggctgctgcttggatcctgatgagccatgtgtccatagtggaaacattaatactgatacatttataccctacacacacagattgacacatgtatgtaaatatatacaaattgaggaaaggactgtatattgttcatgttcagaatatagacagaaatggtgggcctattagcagtatccttatgctagttcaggtttggtttaacctagagtaataaaattttatatagagtttggcagctatgttggtacttacgccaatcaccactaacacattcttttgacacataaaaaacctagaccttctatttctaggacataaacaggatattctgtgtgccatgaaaagtactgctaagacattctaatcaagcacagtagagtataacttaaactactgctttattaatcctaacagtgaaaagcgttgactatgttaagtaggcacccaaagaagtcatttcatcttgcctgcttgacctaataattaccatatgctttgagataggaaatggagaatccctgagttggttgaaaaggtaataggaatttggggaaggagaaactgatgatccatgttggaaaaagaccagcacagggaattaacaccctgatattatgaacaatcccatgagatctcagacgacctcaagagacttgtacttttgtttgttaagaacctttctgagactctgctgacacacactgtgaaaaacatcagggtactagtattatttatctccgtgtttgccagtaaatatagaagttactggccagattttttatttgatcatggcaagatttagtgaaggtcttagatcagtcaaatgaaacgatccatgtgtattagaatacatatattttaaaaatacatttattttgtgcaactatctacagcgcattatatgtatgtgtgtttttctgtgtgtgtgtgtgtctgggtgtattatgtgtgtgtatgtgtatatgtatgtgtgtgtctgtacatatgcatgtatctgtgtgtgtgtgtgtatctgtgtctgtgtgtagcttagagagctacatgacagtttctgctttaacaatgtgtggatgcttgagattggtctcaggcgatcaggcctggcagtgggtgtcttattaggtaaaccatctttcttgttcatgtttctgtttaaatataaaagctgaggttcttcatatagtttaaaatatggagagacattgtatgtgagaacgagtacttttgtttttttccagctatttatgatgcttttctccaacctttcttctttgctgaaaacagcaagtgtctgtactctctgaagtcatttgttaagtgctgactcttgcaagaagaaaacttaagaagtgaatgtagacattgtcaggaggaagcataagggatgaggcaactcagtgaggactggaaggatgttttcaaagtgcagcctgaacccagattgttacttctctcacgtagccaatgttcacatgctatcatggtgtatttatttacatatagaaggggacatattggcattatcaaattatctcctttttccttaacacaaggtaaaaattgcctataattactgtacttttaagagttgatattgatgaatttgaaatgtactgtttaaagttacagactagatggtgttagtgaaaaaatatggtcccatgaaccctacttggtgaaattatttttaatgactttttcttttatagacaagtgcttataaatcctactacaataacttacttaattcagagaagatgtctttttatttccccacttaaataaaataaataaaaaggttattaactaaaacttagagtttgggaattatataaggtaaagtcagtgggaacaagtgtgaggctgggaatatgtcaatgcaaggtttgtttttattagcatactccattcgttttggggagaatgaagaaagaaaagagagattttacagtcatgtacaacatttgaaaatagatctttgttcgtttgagatgcagaggtgaatgtagtattaaacttcaagtctggaagattgtacactgggtgcatcaccgtgtggatttctagtgtcttgagttctttacagaaatggcttagaaacatacggtcgaagagcagtctgtaggacctaaagtgagagtcgggttctttatcattattaacaaatgacttaaattgctattagtgtgtgagtgtgtgtgtgtgtgtgtgtgtgtgtgtgtatgtgtgtatacatcattaatgttcattaacactaactgcatatggtggaggaccaggaaataaaagtttgtgttgctaataaaattaagtgctaacttaaaaaaaaaaaaaaaaaactttaccctacagactgttttttgtgagctgtttccacaggggaatgttgattaagtggtttccattttggtatgacggtatgacctgttgtgacttgctgagtatgtcaaaatctgttaaatcaaaaaagcagctctagctttaacctctactatttattatggtagaaaccagaaacagaaatttcttagggtaagtacaagttttctaaaatggttgagattttagaaccaagtcacttactttatgtgttaacacagaatgccctttttttccccatgcttttcttaaatacatttttgacataaaaaaaaaagttttacgtttgagttatggtattgctgtgtaactaggctggtttagaagtcacttgcctcctcgtcactgcttttaagtgtgtaagaaacatagcttgcataataggcatgttgtgtaaaaaactattcatatgaaacactaaagaaatatggttttttttgactgtcctaaattgtttattggatatgaattttacaaatatcatgtgtattagcggtaatggtggagctggagagtattgcgccttctccaggctgcacggcgggaaccaccaatagtgtggtggaacttgtggccctttccaaggccacggctctttcggccagcagatgtcagcccacgcatttctctgtgtttgtggactggtttggtgatccactgggtgtcaggatttcttctgatagctttatggaacggatcaatgaggataacctcaaaaaatttatatgtggaatcttcaccaacccagtacgaattcaggactctcaaagacccacaatggtacccagctctctcctcagcaacagactgaaggcttcgggcaaatttcagctggttaacaccatggtggacaggcttgccgtaagttgcacccttaggaactgggcgtttacgaccaccacggcggacacgaatcctgtaaatgacatagccttgcttagccttgtaccccagtcttcgagctttatcaggccgggtggggcggggagccctgtgcagcacagagagctggcggtattgccagcagcggaccctcagaagaaagcgcatcacgtcggattgcttcttcctccatagctcctggatgtatttgtatgcacccatcttggctcacctgatggctgccgccagaggaaaggaagaaatatgttttctgatttattctaatatattcttctgacttactcaagaaacttgattatctagatttctttaaggttatgaccaatacctgatttccagtgaatatttataaaatgtaattaaatattaagtgagataattgttaacctttaaatgtggctaacagggtatattgagtgtgctttctgataaacgtttatttgtatcagtactgtactcctatcgtgtgagagggaggggagggaaactcagatctacttgcttcttcatatgagtttctggtcagtgttagtttcttcctctccctctccttccctcagcctaccctccatcccctccatccctttccctttcttctcactatcccttgtcccccttccctcccctctttgatttctttttgaaacaggctcttttgtagcctgggtttcccttctgatcctcattctagtgtgacatgttctaccacatccagtctatgtgctaatggggagtaaacatagggaattgtgtactctgagctggctgtatccccagcctctatagtgagagttaattagctatagggtgtattactttgttgtaattttggcttgtggcttggtcaaacaattttttactttttgtgtacattttgctttctaatgaggttaaattgtctcccacttaacactgtactataagggaacagaaatatcagtgaattggaaagtaaagctgtcaattttagtcttgtggtaaatttattttttagttggttttacatttgtgatttgagagaatttaatttgtatcttttatttatttgtttacttttaaaggcagtgtctcattcgtagttctggctgtcctagaattcactctgtagatcatgctggccttcaatgcagagatctggctgcttctgccttccaagtgttggggttaaaggtgtgtgctgcaatgctagttagaattttagcatcattcacaactagatttaaactcagtttaagaatagactaagaaaacaaactgtaagactgttttccccaggccacagggaagagtgacatcaattgatggttgttttgacattgtctcatttagcctaggttggctgtaaagttaacttcatgcatctacctcctgagtgctaggtttataggtgtgtggcactgctgcaaacaacacatttctttacaccttagttttataagaataccctgtgataagttattctccacctttggaatgagccagttcaagctgaattaaagtatataatagcaggtttattgggaaagatatattgggcggattcactggtcccaaggaatgagtgtgggaagtctttatggggaaggagagggaagagaaagagagaaagagcttgcacacacaggaagagacaaaatgcaagggtaggggtgagaccaaaatgtctggattatacaggaaagagtttctgggggaggtaaagcttccagaaaagcctcctgggctggaaagttcagggtagagggtggggcatgtcagccatgtttcataacacgtagggactgagagacctggtggccaagtccactgtggtatgttaaatatgacctaagctccttgtctttggtctgaacaccaacaccttgtataaaagtatttccagaataccttgtatacaagtcttgcatagaaagtgtgtgggtttttttgtttttgtttttttttgtttgtttgtttatgggtctggaaaggtgtggttttctttgaacaagtaattgtgctattcattatgactttaaatgttaatttctctagctataaagagtatggcctatttaggatttggtcagagtactttttgaaagaaacatgaatatagtgaacaattattttttacatttaatcttaaattatacatgtattttatagtgtatcttaactgctaattccaaaataggaaccttgaagagtctagatcaacaactctttctggaggcattcaaaatagagaattgtctattttgtgtgttgtaaaaatcttgttttaattgtatgtgtgttacatgcatatgactgtacacaggcatgcacctacatagcttagagaaggatatacttttattgctctccaccatatttccgtgagacagagtctttcactgaaccagaagccaccaatctgactggattgactgcccagcagaatccaggaatctgtatgctgctatttcccagtgttggtgttacaatcagtacgaccatgcccagcatggatattggagattcatacttagaccctcaggtttgctcagtaagtactcttaaccattgagcagtctcctaagtctcatattcattcttggcaatatgtgaattacaggtagtggtgaatagtaatgttgactgaacctgtgtgcaagtaaccaagtatttaaattcaagtggttaacatttttgttctatcttttcctgtaaaggtattgtatagtgtatttaaactatatagttattataacaaggttacccattttagaaattttataagtacaggaaaaatagtgtttatcaagggttataactgcttatttacattttcatgctgatttctttcctgtttttttccccttatttgtatttattacctttaagttggatcattctgtttctgtaatggggttagagggtaacatccaaagcattataatcatatttatattatagctagaatttttatgttggaagagtgttagagttcaaaaattttgtctgaaaggttcatatagtattttattcaaaccaacagacaaaatcttagatttttctgtttaaactatagtcatttaaaaaatttaagtttctattttattattttatgtgtactggtgttttgcttacatgtatgtctgtgcatcacatgtgtgcagtactcttggaggtcagaagaagggatactctagaactggagttacagatggtgtgagcctctgtgtgggtgctgtagattgaacccaggttccctgcaagggcctccctccatctcctaaactgtaaacatgtggaaacactcaggttgtgcactttctaaaacaaaagcaaaaccaaagtcaaaagaaaataagcagctggctagatttggcctatagcttatttgtcagctcctgcattggaagataatttgcttgtgttttatttatatttcaatgtgtgtgtttgtatgtgtgcatgcgcatgtgccataatctataatgtttcttgacatgattttcttaaaggcaaggagtcagcctgtgtaagcccactgaccctgtctgtgacttccgcctccttattgcaggaataaaccagctcctgactagtgagataggatgctaaacttcccaggtagaagtccttactgtgcttggcagtgagcttcacttagcctttgtagcaatcaagaaaggtacaacatagtgtgtggagccttccagtgagtgtcatggccacatgcaaaacttcatttcccttgaccttgaggctatgttttcaaatctatttttctaactttagagatgaacttaataaatttatgttagcatagagaaataaagattaaaaatagagaaacaaggaagtagccaaaaatagctattatgatgctccttcttgtctaagggtaacaattatgtcttacattgtatccatagtggaaaaacagctgtagttttggctttgctatggtgctgtttgttttggatcatagtttattctttttttgggtatttgtataaatgctctatttcttacttttaacttaaattcaaagtattccagctgatctttaaagaaatgtgtgtggggcagcactagcgagtaaaataagcctatatgctcttactccttgtcattgtctctaatgatacacacaaagtttaacgtgttagactttgaggagcgcagatttatatactcacttacagacttggacagataccagctttattcagttatagctttctttagatgtgctgtgtttcataagaacatttaaaaggaatgcagtacctgtatttacctttcatcttacaatctgcagttaaacacagtagaccaagaatttggaaggtaaattctagattgtcttttatagtgtgtgcgttctttcaaatgtaaggtgcttgctttaaaaaaaaaaaaaaccacaaaagcgtggtaatgaggttttaagatttttaattaatgtattttgtatgtacgtatggcacaagtaggtcaggggacaacctgtaggagtcagttttcttttacctgtgggtctagggatcacactcatgctgtcatgcttgacagctcacatttctttccctggtgagccatctttccagccctggtaaaaggtgtttctggcttttgtgtaaccctggctatcctggtacttgctttgtagaccaggctggcctcagattcacagagattttcctgcctctgcctcctgactgctgagattaaaggtgtacagtgatgccaccatgcttctggctcttggtaaaaagtttttaaatgagaagatttttctgttgttaatcttgctctgtctcttgccctagtataaactttcccttggaaatttgattagagtttcttggtggtatccttggaatatggttctgaaatgctgttgaacttaaaattttttttcattagcagctttatcagaatgtataaattaaatgttattataaattctccagatttttgacctagtctgagaaagtgtgcttctctcttatttgggccttggtcttttgaattgaacattcccagccgaacagtttctttaactactgtgtcctactaatagaaagggatttgccacaatctcttactccatcctttcctgattccctggccttctttcttctttctttagtatcatctaaagatgatagttagttaattatcctggttaacaggaaaaagtagttcattaggtataggcatagggaaaaactgaaaagtgaactttcacagaaggattaaattagtagccttaacttctgtgcaatcctagtaattgatgtgttttaatgtcttcacactctgtttggatttttaatttggttagctattttttgagccattaagtgagtctggaagaatctgtgcagaatggaaaacattttttcaaaaacataatttttgtatgtatatatttgtgtacttgagtgtttgtatgtatatcatgtgcatgctggggccctttaaggtcagaagatggcattggatccctaggaattcaagttaatggttgtgaggtgttatgtaagtgctggaaactaaactggacccctctgcaagagtagcaggtgctcttagctgctgagccatagtcatgttttacagtggacatagagacagatgtgcctcctgcttaaatgatgatgacctaaacatcttaaacatacttaaggttaatgtttttattgccaaaacatttaccagtttataaagaaataaaaagtggctactaattttactagttttgagatacttttgttagagctaccaagttaaatctcatataaacacataagtatgctatagtatcttttttatttagagagaaacagttactttttaattccttgggtagtaattagctgtcttaacaatcagtgtaggaaaagtaattatgatgttagtgaattttaaagtttgttatagtgacaaacattgtaggatttagattctcttgaaatcatcttaactaaggtatttcatttcaggggccaggaggatggctcaatgattaagagcactggctgctcttccagaggtcctgagttcaatttccagcacccacatggcagctcacaactgtctgtaactccagttcctagggatctaacaccctcacagataaacatgcagacaaaacaccaatgcatatgaaataagtcattaaataataagtcattaaaaaacatcaacaacaaagttttcatcattcattcattcattcattcattcatgtgcatgtgtgctggagtctgctaaggtgtatgtgtgtgctgattagagaacagctgaggggagcgagtgacttctccccttctaccatgtggattccagcaattggactgaagttgtcagacttagtagcaagtgcctttacctgctaaaccatttttgttattctgaaatgatgttagtttttaaacctgtttccaagtcattcttttaactatcgttgtttccatcttctttcctgtttcctcttcttcctcatcatcattaagttttatattggaatgggacccagggcctatcaccctctaacagtgctagatccttaggtcttctgcttctgactttgtgtttgttgttaacaacattaaagtttacaacttttattttttgaaataaatcattaatgattttgttttcaagaagttttagatccatttattttatatgtatgaatattttagctgcatgtatgtatatatgtggtatgtgcatgcctggtgcctggatagttcagaagtggtcattggatttcttggaactggaagtaaaatgcttgttagacagataccatgtggctgctgggaaccagagcctatttctttgcaagagtaactagtgttcttaactgagtctactagttataattatttggcattttactgaatgataactcttagttgtctgtaaaagaaccatcaaaataaatacccaatgatgtgctatcctggtgtcactataatttctacaaaggctgaagtatgaaaagagagacattctgtagtatcttatagaatgttgaggactttggagtaacaacctgtaatcacacaaccttaaccttcttaagcaaaacatgatctgatttttgttcatagtatgattgatacctgtctttctgttagttacatttgaaccttggctctttgtgaaactggagactgtttcttaatgttaggttacatttaagaatacttgagtctatgtgacaatgagaattgagtaactgaaaagttagacgttaactccttctaagtagttattagacacatgtacttattttgtcatctactgaatacatctttaaacccaggacaaaatgaatgaaacagctatttgaggactctacagaataaataaataccaggtagattgagaagactagaattcaaagtaccatctgactggtatgtgaacattttttttttcttacagtatccttgcacatggacttaagcaccatctgaaacctagacagaaaacattgaaagaagtctgctaggtgtgatcaaaaagctgtagagataacttctaagttgagagccctgacctggtgcccctttctctcatggcattgtcatcagaagctacaatggtagcctgaagccaggactgtgagggatgggaagaagtttttctctgcaggtgacagtcattctcccccctcacatttcccctcttctacttgatcaaggcagatactgtgtcatatgtgaccagttagggaatgaaagcaccagcattctgtttggagaagtgagaagagactagttcagaaattaggcactactgagggcacatgtaagcagtgctgtcacctcactggatttcatcatgatgcaaacagtaaacatggacgttatagcgggtgttgtacacggttctgacagacagttttggatgttctagaattgaatggaaaggtctgagtagagaaatagatgagggaaggtatggagatattagaaatgaaaagcactaagagaataactcactagcagaatgtgaagaacttgaagtaagtcagtagaaaaatttctatctgaacagtagagaatacatgttaaaattgaacagttttgaggaattatgggactataaaatattggatattttgaaaacaattgcatagtgagaaagtacttgtagaattagggagcttacaacctcacaaatttagagaaaaacataaagatacaaatttagagaatccaaagtagaacaactctgaagaaatccaggccatatcttcatatatctggaagtaacacagaaggaaaatcaggaagttggaaacagccagagaaaattgataccctctttccctaattaccttgactttcacatcagaacccatggaaatgagaagaaagaagctaaagaagtgtttagaatactcaaagacaagcactatgtacaatcagagaagtgatttttagatatgaacaagtgtgatgatttttagaaggtgatgtaatgatccaagtgaagaacagtattcattggtcagcagacctgctctaaaagagaactaagtgtgttcttaagccagaagggaaaatgatattcaaaggagatttggatgttaggagtgagtgaagaggaacacagtcatagatcattttttttcatgagctctttaaaatatatttagcagtagtaaacaaaaatgtgaatggatgcattattctatgtaacatttaaagaccatttgtgaaaagttaatcatagagccactattaaaaaaacctaaaaggtgttagggcaacaatatataaataaagatgaaatgctcaacctggaagaaggcaaggtagggaaaacaagcaagcaaaaaaaaaaaaaaaagaataaaatgccaaggataaatttttacatatcagtaagttttaaatggcataagtgcactattaagagtttttaagagctgggcagtggtggctcaaacctttaatcccaatacttgggaggcagaggcaggcagatttccgagttccaggccagcctggtctacggagtgagttccaagacagccagggctacacagtgaaactttgtctaggaaaacaaaacaaaacaaaacaacaacaacaaaaagtttttaaggatacatcacaggtgtccctactatgctatttattagaggcatacttcaaatattgtaacatagggatgctaaaagtgaaaagatgaaacattgacaattaatagcaaagtagacttgaaatactcatagtgcagggaaatattgacagacaacagaatttaaaaatgtacaaatcaagatttgagagcacctaaagttgaaataaacaatgaaatggggttgttgatatgaacacttttcttagggacaggtagaaccaggagacacagaccatcaggtttatagaactcatggacagtactgttaaccagctggacttatttaacatctgtagaatattttactctgtgtgcttgtttgaatatgcttggcccagggaagtggcactatcaggaggtgtggccatgttggaggggtacggccttgttgaaggaagtgtgacactgtgggagtgggctttgataccctcctcctagctgccagatgccagttttcttctgtttgattttgagacaaaatgtagaactcttagctctttcagagcacacctgcctggacactatcatgcttcctaccgtgaagataatgaactgaacttcagaacctgtaagccagccccagttaaatgtcctttataagagttgccttgggcatggtatctgtttacagcagtaaagccctaacttagacacccaacatgaacaggatgtaaattctaagtatgcatagaatatttttggtaaaccatagatttgttctcagtataaatcttaaatagatcataatagaaataatctagtaattaggaatgaaagacaacaataacaacaacaaaaaggaatgaaagacaataggaaaatttctaagtatttgtagtttcaacagcagacttctaaataagctatttggtcacagactaaggctaatgggtaattaaaagatgttgtcaactaatatagcacatctgaaattacacagtatattcaagatcgaaaggaaattggttatagttagtgctgataatagaattataaaaaggcctcaaactagtaatcttattttcatttcaagaaactaagcaaacagaagacagaataaatccaaaaataaaagaaagacaatatgttcaaagcagaaacactgtagtctaaatcagtgaaagaattttcctttttttaggtgaagaaaattgagttgtagaagtatgattaaaaaaggaataacaaatacagccagcattatcaaagaaactccagaaatccgaaggacaagaaatacaaaccccaaaacagttttacataaatatgacaatttagttctttggaaaacaacaaaaaagggggtataacttgtttgtctgtggccatcctaccctgaacatacttgatttcctctgctcttagaagctaaacaaggttgagctttctttcttttttttttttttttaaaaggtggtgggggggatatactgtaatcctagatgcccaatgaaaactagaagaaaaaataagccaagaaagcaaggctgacataaaacatcctatagaagatactgtgacacagcacccttttcatctaggagtcttagggcccactgtgttagctttcctgaatgtcttgatacctctgctgggatgatgaatctcccagaagggctgacacctaataatagagagctatgatatcttaaagtcttagtttaaagcagaacagcagttgagagacattttaactcctgaagggttgcagagaagctcttcaaactttatctgaaggagtttgtacattttaagttgacatctaaacttataaattatgtgtatcaataatattcacgcatatagtttgcatgtttggaactgacgcttaaaattaagttgctgttttaaatgttccctgtgaaacagctgtaataatttgattcctaccatcattatccatttaaaagaacaggtgtaagatgctgatattgacagtgttgctaatgcagaggacattgtggtgtttctcactagggcttccgtggaaatcagcacttttgccttgggttgatgaagatcactttgcacaggtcattgtttctggccatttctggctgatttattacattggactttgctaaggttatagttttgtcctagttcagctaatcaattccattcataccattatgaccattatgacctttgcaactacttgtgtcagtttgtaggactctttgcatcatgataatgacactcctttaattacaaaagccactcagcatacaaaaggtgtggtagaccttccaaattctctactgttatgactccagaattgaattttagaatggtcacaaaattaaataataacaacaagatcaacaaaccactccactcctcaaattctgccaatttcttcttgattaggaatagtttggtcatttgcatgtagttattcccagagtgtgttatttctcagtaataaactgggtaataatcagaacaaaaggctcatgaagtaacagacaatcttaaaaaacatgacctcttttgttcagtgtccccacattcattcccccactcctgcccttttcctacattctttttctccctcctcctttcctcttgtttatttgatagtttgcagtgttccttgtcattcattcatttcaccttgtcattcatttcaggtgtcaatctgtacaaaatgtggtcattccttaacttttgaagtctactgggaccatgtcctaatttgtgttcctcctacacaaaacacctgttgacagctccagatgtctttcccttccccattcctatagctgctgctcagtctccctgacctggctctgtgtggaaaaacaggacaggttgggctttcttctcttaggcagtcactttaaaaaataaagacccatttcttggtcttaactgatgcccaaaggatttgttttggaaggccatgtttaaaacatcttccctgagccctgcccttcttctgttcctcatgtggaatacagaaattgtgcttggcattgattcccagatggccagacatgaccttgattctatagcagaagcacagtgacttgcactagaagggtgctcatgtagacaactttttatattaagaaaccactgggttgtgtctagatgattgcggagttggataacttgcatggacctttgtcaaggattgactggttcattgtttgtgctgcaggttgttgtctctagaaccgactcctacaattaggatgagtgtgataaactccatccttgatgttagctgccgtgactgattgtgctacttggttcttagacatgttctgattcatcagtgtactggaattcccttagacttctttatggaccaggcatatcataaagtggattttgtgtaattattaaaacatcttgcaatacctggattattttggttgttccaaatgggaacatgaacagagaaacataaggaaaaaaaccacataggtttctaaggaaggccgtaatagttattacttgttttgctgaagcagtttaagaccctggtgacttgggtgaggttggtactgtaaattgacttcactttacttagagtcttgtctgtactaggcttcattgcaaagtaaataagcttaatcctctatttcattagtcacactaatccgcatagttgatagatgtaaactcaatgttctctttggatggttataagaatttacttgattgagggtgtcagactcaaagaaaaattcaccaggtgcctatgacagtgtagaaacatgggctgcacacatcttggaggtaatttcccaaggatctttgcattgccacgtgagcccaagaagaagactgattgtttgtctagattaacctttcaaggacttacacagtgaacagctttgacaaacagacataccataccctctgaacaaagggcaggtctgtttactgtttattgtctcttccacagcaaaagccctatgtgtttactgagtgttccagaaggcttcctaaactcaggcttaaactctgtcctgagaaccctgtatgctcagacatcatttattagccctggggattgtagagctgatgtatgctgatgttttaagctatcaggtcttttgctttcatctgtgagagtggcaagcttactttgttagcttataatttggggcttctcagagttctcctacatcttgatactgagattataagtgctctcttgtaggcattccctattcccataaaaattgtttgagaaacatcaacaaaaatttcaaaagtaagccaggtagtgttggcacatacctttcatcctggcactcaggcagagacaggcagatttctgtttgaggtagtgtgcaaagccagtttcagacacgtgtcctgctgacaaaactcttagatttaggtacctatcaaaaggaaagtagttgagagcctgttaggaattgggtttgacagtccatttaagaaggaataaggctgtttccgtgctgtgaatgccactaatgaccaacacgcagctttagaggggaagcattggtgcctcagaacgctttgcttacatactcttgcagcgtaaatgtggccaatgtattttgaacaacatagtacttaattattttatttagacaaagaacttttttccattacaaagttctacaacattaaaaaaatccaatcatattaagtttctttttgacatcatacaaaaaggctgtataagagaagtgttgttctagtagcctatgtgtttaggagatgtgaatctactgggaggaagtgaggcaggtgtgttgagttcatcttcctcttctagcaacttcagtgcttttcatatgtatggtcagtttggcattattgcttggaatagctttttaaaaagatactttattctccccatgaaatagtaagaaggtttcctttttttttttttttaattcgttgcctaatttctaagtataatttcttcagctgttcaggctgtttgcaaaagacaataatatgaagaaccattatgttcccccacccttgaaagctaatgcaagcagctacatgtatattatcacaccaaaattttgttgaattaaataaatacattgtttaagtggtttatttttctacacgagcaattaggtaagtatgttatttcaggtggaagacttggagcctgtaggcggaacaatggtaagcttttgttaggagggaagacttcatggaagaacatgagtaagtaggtaaatagctagggtggtatggttcatctttgtaaataaaggagaccaacaaacatttgaaaccaagggcaggaagtaagtggaggggcaaaacatacctgtagtttgtagaattgtgtatgttaatttcatgtttatacctctttcaatttcaatgaaaaacattttgaatgggaagtttttctttgcagtgtcatatataacaaaacagtatactaaaaactaaataaaggaagaaaaattacaatttcaaatatggaaggtataataacattttgtttggtattgggggcataatacaagtgaagagaaggcttagaaccaggaagtaggaaggacattgatagtactagctttgagggccaggtaaagtttttgagctgctgaggttcagcaggggatgaatgagactagaagtaggacctcaacagtagcctccagatatgagccctggcttgctttctccagttatgagggagcagtttgcatctaatagggaagcaggttcagagcagactgagacaaggatacaaaacttgttttttgccaggcctgactcttgtagtgatggaaacctagaagataggagcgcatattgaatgaaccgtgctcattgtgcgactttgacctacaataatgctgactatgaggttgaatacttgcagatttcttttattctttagtaatggcagtgatcaacatttcttagatcagtggttctcggtctgtgggttgtgacccctctagggttacatatcagatattcggcatctcagatatttgcattaatattcataatattagcaaaattaaaattatgaagtaccaacaaagtaattttatggtgggggggtcacacaaaatgaggacctatattaaagagttgcagcattaggaaggttgagaacctctggcttagatcttttcttgtctgatcatatggttggtagaaggaaatagcatcctgatttaatgggctttcttaagtgaaaggagaagagtttgctatttctggcctgtacaagtgggagtggaatgaggagctaggtgggcttttgtctattttaggatattgaggcttttctgtgatatataagagacattaaatgccacttaaatattaaaactttttttgtgttgccatatggaaagattagctagcattatgtgaaataatcccaggtagtattcctactttgtgcatcgaggagattatttaaatgacatcagttggttcttatagaagtgacatgtaagtatctggtttgcttccttttagtgctaaccctaaatacttattgggtattttatttgtgtcagattcttacctacatatttcatttaatcatgtagaatctaaagacattgaaatctgctaaccagccatattaattcattcttcttaagaaatattgattgatgattttggctcattggccactggtacttagacatatacatccacatattggctccagcaatgtgagttgtcctgttaccaagagccaattgatttttgttttcaaatttctgggtttttttgtttgttttgttttgttttcttggagacaggttatcactatatagctctggcttgcctggaattcaatgtgtagaccagactggctggtcttaaactcacagaaatcacctatttctgcttcccaggtgctgggattaaaagtatggaccatcacacctggtacaaagggtgcctttttatgaaatctgtagctcactaattggctagagtggttgatcactatcagggatcttgctgcctttcctctgcagcgctgggttgaggtatgccgactgacatgcttggtgttccttggattctgcatgcctaaacccatgaacttgcgcttgcacagcaggtactttactgactgagcacctcccagttcctcttctcagatatctgacctgtgcacctgagctatctccttgcaattaaagactgctgagcctgttttgtttcagtcagcaaaataatctcaaactggaaatcttatattaagtaacacaatgggatgttgttatactgtagaataagggatgagagaaataacacctcagagctttacatacttaaaatgcacacacagaattttaaaagtaaagtatcaccagcatcaaagtcgcagcatgacctcagtgtcttagatgcgtctgttcgtgttgtagtcttaggcagagtgatacgctcattttcaaactttcaagattactcataaactatagtgtttatgggaacatgtttaggatttttactactcaaaatggtatcataggaagaatggtttagacatttcaggatggatataaaggacaagtggaaagaatatccagccagattgttatactgtcatttaagagaaaatatgggtttcactgttgttcctttggattacaagataggaaagttttcttgagggatgggggtaatagaaccagataacacttgtgggtgggtattacagccattgatccttgtaatgtgaacagggggtgtgccaaacatatatagctttattgtcacaaaaattcttattagtgagcttaactggtagacagaattcacccaatggggttagatagcttgtcatcctctgctccattgagcacttttatctcagttaagagcaagaaatggtgaaatggtgaggttcattaggaaaagattgtctagaaaggctcaaacgacccgacagtgaatcctggtagacatccacctacctggtgttagtagaaatcttctactaactagaaagagtaattaactaataagacctctgacaactttttctcacgagattttccatgtgtctctgtattaaccacttttctcattgctgtaatcaaacacctaacaaaataatttaaaagaggagaggtttattttggctgaacagtttgagcaaggatagttcacctttgtggggaaggcaagatgacagtagtgactatttgggtcatcttgacatcttcagtctggaagcagaagatggacaggatgtgaggctgacctgagaagcctctagggctgcctctagtgacgaccttccttcagctaagttctactttaaggcccaccctcaggaggaatgaagtactcatacacctgagtcttgtggggcagtgcacattataccacaacctccttagttggtagagttagaagagtagccatttggatacagtttactagagtaaagagtcaatacagaaaataaaatatgtgttcaacttgctttgtatatgtttgctgaatttcaagtctttcagaattcatctagtatttcattatagtttcattgtatatttgcatttccctgtatgtaattaataaagtgttttttgtctcagtaaatatatatatacatatatgtttcatttgtttgataaaatatgcacttgaagtatatgtgctcaatgttttgtgatttcagagatgtatgcatgtctaatcaggaccatgtccatccttcccaagagcttccttatacccttttcagttaattttccttaacaagcctctcttgaagccactcatttgatttctgtcactggaaattagtttagcctgtcctagaagtgatttcatggtaatggagtagtatagtgcaatctcttttctggggcttctttggaataatgatcttcaagagtcatctaaccttttgcatatttctgaaatatttgacttttagtcctaaatcacagtttttatatacctgtggttatccatttatttcttgatataattttttctatttatgaatgaactagtgtacaatttttgtataaactttttttggtttttagtttttgtttgttatgttttttcctttctttttctttttattttttaagattcctttatgtaacagccctggctgtcctggaactcactttgtagaccaggctgtcctggaactcacagagatccatctgcatctgcttcccaagtgctgggattaaaggtgtgtgccactactgcctagctccatgtatttttagtttttttgaaatttatttttttggggggtaatatctaggactaaaattattgggttacactataagcatctggataatattgtcagaaaatgggaaactaccttccaagtggtggtacatttctgcactcctgtaagaagtgtttggtgttgctttgcattgtctgaaacactttgccagtctctgacagacttccctgtcccagtgtattcacaactcattgtggctttaatcacatttctctgggaactgatgctgctcaccacctttccttgtacattttttttttttttttgtatatgcctatttttaaactgatttgtcaatgtattactttgaggctttttgtaattttggtcattaaatccctgttagttatgattcttccagtctttgtctagccctttcaataccctaacagtcctttgaaggttttagttttgatgaaatactactactcagtattaacttttgtgactaaagcaccttcagtcttctccaaaaacatctatttttgttttactgtattgacaaattttgtagttttagattttccatttagttcttatagccactttaaaacttgaaatactagtgttaagtcttaaaaaagtcttctattattctgtagtaggactggtcatcagtagagcactttcctagcgtgtgttaagaccccagaatttaatccccagcgaaaatttcaaaacaaaacaaaacaaagcagcattgtagctgccccagtgctgtttatagctgtcagttatcactgacttggttgaaaatcatttgatcactttttattgtatgtgtgtgtttcttaatttttttcctatttttctatttcatgttttagtttttccaagtttatgtcttgaaattagattatgtcaatttggtttttcttaaaatattattttgcctattttaggtgtttacattttcatgtatgtatctgttaaggaagctcatcatttttacttcaaagcagtttgatagagtttagttgactattgttttattttaaaaaacttttttttttttaattaaggaaactgtattctgtaacatgggttatcacatgaagttatttttttttgatttttagaattaacatatggtaaaatttgtttccttttagcttacaacattttaatatctgtgttattcttaactacattcatgatgcctgtttttcttgtcctaaacgtactggtctgttctctgatgttgtaatcagtttctctttttgaaattgtagtcaattataataataacagtgtgcatgccagctctctgtagccatattgagatttgattcaatgttgtattattatagtatatgttcatctgcttatttggtcagtagcattgtgtaatatatttatgttctttgtatttcttggaaaaataatgattaggatgattatgaatatttttgtacatttttgtaagaatattaggcaactgagtcagagacagttcctgctccattgttaggggatccacatgaatgccatgctgcatagccactgcaagtgtgtaaggggcctaggttcagcccttgcatgctctttggttcatggttcagtctctgtgagtgaggtccattggtccaggttagttgactctgtaggtcttttgtggtgtccttgaccacaccagctcacttaattttatccccctctttcactgactccctgagctccacctgatgcttggctgtggtctctgcatctgtttccattcgctgctggatgaagcctctcaggaggcagttatgctcctgtctgaaagcagagcagagcatcactagtagtcagggatcagctctctctctcacgggatgggtctcaaattggggcaggcattggttagctgttcccttagtttctgttccatttttatccctgtacattttgcaggagggacagattttatgtggaaggttttgtgagtgggttgatgtccccctccttccactagaagttcagccctggctacaggaggtgccacttcagtctctatatccctttctggtaggaatctcagctagggtcaccgccatagactccttgttagcctccctacttttctttttaaaaaaatctaccttctaagtgtatggcaacatgaagagacagttgtagacgtggactctgtgtagttgtaggacagaaaaaaatatacctaggaaattagaagaggaaaagagcctactaaaaagattcagtggatttgaatacaaccccaggcttgcctgcttatgacattaattatcatgtaaaagactttaagaactggaatgtgggctaaaacagtcagattgcagaccaacccctaggagggacactcatagaacatctacatagtaaagacatagtgattcaaattttaacaatcctaagcaaagggttggaaactgaattggcattggagctaacagcttaattggtactcacatcctgaaccaaaccaggttggctgctgaagaaaatatgtgagtttactatgcagagtgtaagaagattctgtttcagaatgttgctagatatgctaatggagggatccaaaatttcttgatatacaaataagctgcattaggaaatctgctaataggcaactataacaaggagatgcacatgcttgaagttacctgctcaaaactttaaaatcatgagtatgagttaacatattaaacaagcagttgcaaacacctttgcaataatgtgaggctaaaagcatcagcgaagtagtaaaagataaagaggaaaaatatggagtcatggaactgaaactacaaatttaataacttcagtagatgtgtgtagtaactagatggaaatgaagaagagtcagtttgcttaaatccagcaacaggtgatggcacactgggaatagacagtgaagaaccaagggctgacagccagcagcctcacctgaagagtctgcagtagtaataggtgagactgagacatggactgcatgttcgtcagtcccactgtaagaaggcataaaatatttaagagtgaaagagaaagtatttcattgtaggaaatctagacttttctgttcttagaactgttttagtcttcttacattattactgcaactaagttaatgatatgatctgaaaagtaatgccaaggtaattgtcttaaaaaaataaaacagaaagaagagtttttggtgtgtgcagaagttcggtttgttatatctcttactttctaaccatatgcaagtaagagatataacacgtgtgttgtctttttctctcaaagtttagttaggtatattaagaaaaaggggtagtacaggggaaagccagggccaaaaagtgggagtgggtgagtaggggagtgggggggagagtatgggggacttttgggatagcattggaaatgtaaatgaggaaaatacctaataaaaattaataaaaagaaaagaaaaaaaaaagaaaaaggggcacctttggttatttaatcctcctaatgtaccattaagtaaagatcctaacttccctagtttgtaggaattgtgtagctttaaaaagaatgcagatactagtaggtataaggaagaaaacagattgtgaaaccatgagttggcatgatgggcgtttatttacatgctatttagtatgaaaagaatgtttccctaggaccgtttgttctgaagagttgtttagactacatatactgtgctgaaattaaggaatatatagttgaaatgtcaatttcctgagctactttgcaccattgatccagtatcttgcttttgctagtatgtgttagtctttggctatacttcagccgtcctttaaagcacacaactgctcttttctggaagtgcttggataatttaagtgatgcatactaaaattgatcacaattttggactgttttcttgttgggattaaacaaaacactaccctgcgaagggaagaatctttagattttgcttttcttatgagttgatggccatttttctttcttcattttttctttttgccactacagttaaccactgctttttttggtgaggagaactccctttgttgagttgagttgaagctagtgtatgttgccacctgtgaagtaaaaccaatgcctgtggcttaacatcagttatatgacttcatgtttcagcttgctttctgtacttgtgcacaataggttcataaagtgtgttaactgatttaacattgaataagagccatctttatagggacttaaaggaatatgtatgtagttcacattttctcatatatgttttttcaattagaaatcataatgtaataaatttggtaattttagaagttctgttttatagagcatacgtgacttttttcaaaccacgcaggtaatgatagagcactgacttagtccagatccagagcctcactcccagtcagtgtcacttgtgtgacatatggaggatttaatggtttatccagagcctcactcccaggtcagtgtcacttgtgtgacatagggaggatttaatggttttgaatttcactctctggtggctaagattgataccggacaacttctatgcatttattggctgtctgttatctttttgggagggttgtcttcttcagaccacttatgtatctttaaatttaattttagtgagttgtaatagttttctcttttcctttgtagtatttgggattaaacctaggattttgtgcatgctagaaaaaaaagactctatcagtaagcttcatctccagtccaaagaaattgattgctatagttttcctaaaaaattcaaaaacaagtcctttatgtgagtctgtggattatcttttgagtttcttaattttcatcgtatccactttgcccatttttccttttatgccttatgtttttattatatctcagagagatctttaagtgaaacagagggaaaaaagaaataagccaccccatgttgtctcctttgtgcaggaggactttgaggtttttcttacaatgagccatggggtcaggacagctgcacatcaccagcagctggagtgtgatcagatatttaagaggatagtcaattgttttttccctggacaaagagatagaagaattctgaacattaccatttttcttaaactgttcaggttgtaaagtgtaatgcagcaaacagaaaagtttggaaaatgaagtcctctgaaaatattaaaagtagtataaactagccgggtgtggtggtgtagaactgtagtcccagcaccagggatcccgaaaccagagatcacaaatttgaactacctaagtagtggggtgtaggggtagggcactagaagactgtgacaatccagtgagggtgggtggaaggaagccaagtcagtagactgtcattttcttattatcatgtgagtcttgttagcagttttggctgctgtaggaaattgttaggagccctttctttcactctctgatgttgcacttttactttgctgtgctcttacatttttatggataagttaactcagagatagtgttagtactgcccattctcatgaatatgcaattgatttcccgcatgtacagttacttgtataatatgcataaatacagacagtcacagacatgtgtgtgcatgcaccccccacccccagctcacacaatgtggtgtaactagatagggtagaaagccagtatttgttattgaatgggcttcatttctactgttacagatatatatgtgaatactgagctaaattgtgtaaccttttaacagttactactgtaattgatatgaaataagccatccttaagaaagcttgatggatttttaaggaaaaagttttaattagaatgtgaaatcatctataaaaaatgatatgacagttaaaagaagaaaaaataagcaatttcctgttctgtccttattaaatgacaaatgagctgtaaactcatgactccttttaggaggctgggatgggcgtgggtctgggtcctttgccctcaggtctggtttccaggatcttctgctttagacttacagagataaattatctgatggaaaaatctgctgtttatctctttattctgatgtcattcctttaattaggaaaagacagtaaaacagaattttatggaaaaaaagaaaagagacaagtaggggtttatctaagaaaatatatatttttaatattcaaaaatatattttttgttatttttgttaagagacttaatttggggaggagaaaaggaaaattatggagatctatatttttcttaattcttgttcagatgtattagtagacatggagtaaattttctatcacctgcgtgcatgccatgcggcagacacgtggtgtgggttttttggcaaccttccttacctccccctcccccccccccaaccaagtaagttcttctccaagagctgtggtttctgtaatggggtaccttgccaaattcttaaatgtcaggtcactattcccttagctttctgtgctaacacacagaaccagcacttgacagactttgaaactttcagtgccatgttgtcactaagatctaaaaaaaattttttgttcttgtttatcttttgtttttattagtatgatttctaggcaagcattgatggctgttttctacatctagtgcactaagtttaatgctattcacctctgtaagtgatgatttaatcaagaattcattaccacctagtgtgtaaatagagctttggatgtttgcaaatgagtgaacaaatacatatgaataagcttatagaaaaagttcacagaatactgcactttttacatccacaagtaactaattatttaaaaccaagaacatactaaatagtatgtgttcttgtgtaggttcaagagttttaatagacacagccttgtaaatgtggctgcaagtagcctctccacagaagtcatgactacagagcagaaggatggctttttaataactcaatacctgtggagacccagaaatgatgtgtagttgttcacccacattgccataggtatatgacaacatttgtgaaagaaaaccatcatctagaaggagcccgtggatcattgtaacagcaagtgatgctcatgggtctccccacccacttctagaagagaagaacctaatgccgagataatgtgtaacgtattccattatcactagaatggaccctttatatttacaagtaaatattctgtagcagctttcatttagttggggaattttatgaagtttcatgctgtcaagaatgttctccctatataagatttagtatttttttttttagtgttactttcatcctgtaaatactaaagagaatctcacagaccctatgcccactttgtcccaaatgaaccaatacagtgtacatttctccctctccccttagatctatcacatttgttacttcaagaaaatcctacatctttctgtttctcattttgcctgagaatctattgacattcattctgagctgttgtttctgctgcctagatagtactgggttgcttcttctgataattcttcctagtcaagatcaaactgtgttccctttccttcattttgaagcctgagtccagacataatttgtgtatcaaatgatctcccctatgaagtatgcctgacctttcattacacagagaagtcctcattgtttcaacaagcctgtcttgttttaatacaaaatgagtagctctgactctgactctgcttgtacacccaacttctgaactttagtgtggctatcttgtttttttttttttttttttttttttgaaaattataatgataagagctataggagggacagagtttctttgaccattgtcgttagggttttcattcctgtgaagagacactatgaccaagaattcttatgagggacaacatttaattgggactggcttagaggatcgttcagaccattatcatcacgataggaaggatggtaacatccatgcagacacagtgctggagaaggagccaagagttctacatctgttccaaaggcaagcaggagaagactagcttctaggcagccaggacagggtcttaaagcccatgcccacagtgacacactcctccaaatagtgccactccctgggccaagtatatccaaaccacaaccatcttctttaagaaatgtcagtatcctcagcatttcttcctcttttccactttatggtttgagaggcaatagaaaagaggtctttcttgtttcaaaggcacttaaaatatgtctcaaactgaagtcatcatctttacctcattcatagtacgacagggatatcttacatccttgctgctctccttagcggtcgtctctgttagttaacacttagttcttgaggtttccacattaaggaattctctagactgtctttgtagtgatagccactggtcttcctaacatagccttctgatttgaaagtaaaactagaggaaggctgatcttgggttatgaccgttctggtcctcgagtcaattccttgaagagatttatttggcctagtttcagcataaaatctattatttggtatgatgaagacttctgtgttgaatgtctagcagaagtcattgttggctttgaagccagctaattttgatcctttgctggtatttcatcacagtcaattctagaaaacaggactaagcctggtgtggtggcacatgtgtttaatcccagcacttggaagacagagacaggaactctctgagttccaggtcatcctggtctatataaagtaagttcaaggacagcctggtctacacagtgaaactctgtctcaccctcccccactacagcccctggcagagagaggaggacttctgttagagtgttacctaccccttcaggcgtgtctaggcagaggaaatcaccatacccccaaaccctagtctgccatttgtaaatactaggcgcagcagcagttgtggccagtgtcccttaagactccgacattacccagctctgctactgctgctctctcacttcagttgccatcacagacgctctgtctttgatgaatttttaaagaaacaaattagcaatgaattttgttatattaatttgtggtccagtttagatttttgtttttaacatagactatgtgcttgattatggagtcttgatattatgcaagatagcctttcattctttaaaactaatgttgtttggtttaccagtgagtaaactgatttttaaataaaattccatttgttttcaccagtggattctgaatccaaagaaagctcctggcaagtgtataacctgacagaaatgtcagggaacagatggaaagaagttccgcaagaattggcagaaaagcagtttgactttctgaaagatagtgctagtctcatttcttttctgtggaagtaatctgaaaaagagcacaaactccaaatgaagaaacatctgcttttagattgatactcgatttcagataaaatacctttcaaatatggtactaactgtaatatatatgtgtnnnnnnnnnnnnnnnnnnnntatatatacatatatgtgtgtgtatatatatacatacatacatatacataaataatttaaagagttatgatttctcagaactttaataatattttatgagcagatacaaaatataaaatagttcaaagttaatatgaatagttgtttggaattttcctaatgataccgtagctgctttggttagggtgacaaaaatgaaatgaaggtaattaacctacagtatgaggattagttttcttctgggttctgtagcttgtactctcacagttcttgcagtcataatctttgatatgtgcagagggcttttcatacatctcaacatgtcactcactgtagggtgctgaagatccaattcataaattctgtttttaatattgacctattatatggtcatgtatgcaaactcataatgcccctgggatattagcagagtaaacttttaactttcagaagaacacgagatttgagacaggacatcctcatcaacatcaggcatttttttgtattagataaaacttaaaatgcagtataaggcagaatgatatatagggaaatagaaaagtacattagagactaaaagaaagatggtactttgggagccagacaagttagatggcctgttagggttctctgacttctagttactcggctgcttatcttgaggttggattaatcttgatgagtctgttgtttcaatagtttactgagtcagtacatctcagtcactacttgcttttttttttttttaaatctcttctcggtgtttttttcctttgtgatcactttagtatagtacacagtctttcaccatgttgagaattgtggtggaagctaaagtgtggcttcatgctaattttataatgtgtatatgctgcatttctacaaaagaatcaagttaagcaaagatctaaatttactgctaaacataaaaacaacaatggcacacagaagaaaacagaattcagggtccaaagccagcaagatcaaaaataaatttgctacttgacatgtttcacatgtaatgggcttattttggcagcttgtggggttaaaaatacaaaagacatcgcttatacaaaagcacaagtaactgaagtgtgagtgtgcgggcttgggaagaggaagatatcattggaactttatggtagctgtttcatttgtataaagaaagctgcctttcactttgtttcatttattgtttacctaacttcattgctaatgtgctgtctttcatattcatggaaattgttttgggcaacagaagacttaatcattaattcaaaatgcatcagacacattttccctgaatcttgaattggggtctttcgtagtatgtttacaacgtgtttcatattgtgatgtattcaccatttcacagccctttcctatatgggcatctacatcatataattacaaaatagcttttgttttatcttaaggaaaagaatgaaacaaagtaacttcatacatagttatgagtctagaatatttgtagatcatctggtagttataggtgaagaaaaagagatcttttcaaagatacaggagtgggaaataaaagcactgtacaaaataaaaaaagacccttgataaaagtcatgggtatctgtgtgtggatgagtgtgtattcaaacagacatctcatcctccactggatgatattgtgttcttctgcggattcttatgaattcctaattgtactctttttattgtgatagaagtccacataacacaagatctactggtttaacaagttttgtgtgcagtatagtattattgggtacaatggttgcacagcagatctttagaaccttgccgtcttgcaaggctgattgtggtagtcattggacagtagctctgaaacacaccttctacccagttcctgacaaatgccattttacttgctgctactgttgagttttgctacttccaaaacaaattctggaatttgttatcggtaactgccttgttttacttaacatagcaacctccaggtcctccagtgttggcaattgcaggattcctctgtttttctaacctgagtaatactccattgtactatatacatcacattttccatatctattcaccatccgttcatcattcagataggttgttttcacatcttggcttttgtgctaatgttacagtggatgtggaagtgtggttttatttctttgatattatgagatcattcattttgggcagctgtctagacagatttgttagagcatatgtttgctctatatttggttttggtgtgtgttgtatgtatatagtgttcatgtaggtgtgggtatacttatctgtaggctagagggagatactgctgtcctattctagtactctctgccttattccacactagcaatccctgaaatctaagctctcaacaatttggaagttacatatgtgtgtgactacctttcctgtttacttgtctggtggggatttgacctcaggtctcatgattgtacagtcagtattattacacagggctagcttcccattcttggttgttttaattttaattgttttgaggaacctttgtagtattttccataaaggcaataccattatgcttctgtcagtagtacagaaggatttttaaagatgcattttttgctaggcatagaggcacatgcctttaatctcagcttgggagatagaggcaggtggatctctgagagtttgaggtcagagtgatctacacagagagttcctgaacagtcttttttgaaagagttcctgtttcaaaaaagataaatatttatctatgtgtatgcacacatgtgcacacacacaaatgggtttgaatgcctgcaaaggccagaaaagaaaattaaatcctctggaggtggaattgcagatggttttgtactgcctgctaaatgtgggtacttggaattgaattctggtcctctgcaagagtagcaagtacttctaactacctctaacctgtagaaggattttactttatcctcatgccactaacagtttattattatttttttgtttatatgtgtgccatgcttctggccatgtgtgcaggtgtggattccagaaacagggtacagtatcttctgacttgtctcttcactgacctggaggtggtcagccagtagtgagctctaaagacccatatctctctgcctgctatgctggaattatagacactgaaatgactttatcaatttcaatgttccttccctcctttcatattcatctcatgaatatgaaagacagcatttataaaatgtcataaaggtgtttgtgcaaatccatacttttttctgttattttacttcagcctgaaaaccttctagtagtagtttagatttgtggtctgtgagtccaggacgatggttgtttttcatcctgttcttgcatgatgtcatttcattgtcttctggcactcgctgcttctcatgagaagttggtatttccttgaatcattttccttttatgaaatacttttttctgcctgtagtaacattttcctctttgcattttgattgccataggcatgggtatagttagtttataattctgcacagagattgctgaacttgctgggtttgtaagttgatctttttcattgatttggagaaaagcctaccagctccaccccaactcttcagctgatctactttggtgtgtttagacctgttagtattacctagcttaaatttctgcatttctcctttaattttatttatgttccgtttatatatttttatatataccacttatttgctgttctactcattattaagcttttccagtgcatatttctttcaaataacatgttactatattcctgaattccattttaggtaattcttcctgcaaaaatgtgtccatttattgttactattttttccctaaaaagtgtttgaacaattacaatagctgctttaaaattccattctgcttattcagacagtggtgtgggtcacttctttcctagactcatattacattctcatttctctacatagctagcaagttttttcatacaatttttgaaaatgtagatgaaaatttgttgaaatttttatttttgttaatttctgtagttctgttttgctctggaaagtagttacctttattggttggctttcttaagactgaaccttacgctttatcagaacagttctgtgacagcccaaattatgtcccaagccccttaattagcatctctgtggttcctagtagctgaaatctgtgctagacgaatttagtatttcagcttgtacttactttcctttgggttccttagtatgtttcccgtgcttcattcttcagagattagccaaagatttggggaagagataatgtaagtttttggaccttctgtttaatttgtactttttattgacctcaattgttaatcatattgtattctccaattctcttttctttttcagtaagccagtgtaatacaaaaaattaatgtcctcagtggacagacctgtagattaggatcttatccagtaactgactttgctttttgtttttggcctcttccccccactccatcccccatttataagatctcttccagtttttttttttaattctttttattagttttttgggcctgattatttataatacttattttcaaagaaattgctcaaatatttgtctgctattatctaaaagaaccatggttcttttttttttttttttaaatagtactttggtaacttcttgctgttcagtttttgtgatgtgatcaattctcctctactctgatttaatttatgcctcagtatatctttctaatgggtctcttagtttcatggatttgcagatcgatgacttctgctatcagtacctaagacgatgctaaataagctgatccctatgtagtcttgttatactttaggagactgctaagggactctgaggaaggtttgccttttgtgttacttgtttttatgtttcagatagtactatggtttttaaaaattataaggacatttatcatgatttacctttttaagttttggaatgtacaacacagtaatgcatttaccactcttaattggtggcatgaatctgggagagcagggcctaaaaatgaggtggactaaagtctcatgcagtaggcaactttgattcagagcatcagacagtttatactctaatggttaagaagagtcacacgaataaagtttataactacaagtacaagccatgtgtagcaaaaacgtgtttttccatagaagtatatgaataacaacaggtgaagtattcttaaacctatcctttgcacctaggaggagcacaaagacgcattctaagaacagttctgtgttttgaagaaactcaggtcacgagacatgttttctttgagtttttctcacaagcactcagaattctcacacaactccattcttggactgtgttatgacagtagtgtactgtctagaattccatttaacataaaggtttcctttctcttttatcctagaccttagcttctactttgtgcttctgtgagtttgactatcacagacaggtcacataaacagtttcaagtactatttgtgttttggtgtggggggggttattttactgccattatgtcctctaggtttttttcagtattgtctcctgtgacaaaattccttctttgccaatggtctaggttcaataacccccatgtatattagagttttcagtttgtcacctatttactactaggtctgtctctccctgcctcacatgagtgcagggctgggacccagaaatggtgtacaccaaactacatctctatcttgatttatattttggctgttgtaataactgcagtgaatttgaggaagcacatatctttttgatgccacagtttagttttgtacagatagtcaaatgttaagaggttttctgtttttaaaaatattttactttttagtcaagtaaatgtgtgtgtgactgtatgtggacgtgtgcaggtgagcagaatgcaggtgcttgggtaggtcacagacatggagtcccctggagatgaagttacagggggttgtgagttgtttacgtgggtgttggggtttgaagttggttcttagggacagtggaaagcaagtacatgctattaatgatgagccatctctgcagcctgattttctattgtttgaggagttacatagttttcggcctcatgtagagtaggtcttttatggattttgacttgagatttatatgggaggttgcagtctactctctgttttgagcaaatactcagcctcccagttgttgagatcgttgtttctaacggtgacattcacttgatgtttccatctctgtttttcctctggatggtttctcagtttctttcattagttttcttactttctttttgggtaccaaaatctgaactcagttgtacatgtttagatttgtttgtatcacacatctgttctagaaaatactccataccaaataccggacaggattgcatgttattgctactgttggtgtgatgtgacatgtgtatgtaaaagtctgtttgatttgtagtgttgatacattgtaaagctttagtagtgttaatttttggaccattttacaagtcttagggtttggttaggaaggcaacttgtatatatgtaactgaaaaagccttaggaaaatagttttagaattcactgatagaggttcaattgtttcatttaaaaatattaatgattttgagatgaggtttcactatgtattcctggtttttctggagccagatccatttaacaggttggtcttgaagtcagaggtatctgcctgcctctgtctccctagtgctcataattaaatgcatgtctcaccgtttttatgttttatatgatctttatttattttaaaaaacattctgcctaccctgtaaaggatttttataccttttcctagacagctatattatcctttctgttattacctgccttggtgattttgagaattagactgtttattatgtctattactagcccatgtcttcacactgcatttaatgaggaatattattccttaatgcattctctcattcatggtcttctggattgtttccagttttagctgttctttgcatttcttcatgaaaaagactcctgtagggcatatttttgcctttttattttttgaaggtataattttgtttagaatatatgaatatcttttaagagagtgccagtttcagaatgtatcagtttattgcccccactggcaatagttaggatttgagttgcagatcatagttttgtcataaattaatgctaatataagtggatttaacagtgtccttgatgtgtttaacgttgttctagtctgctcaccagttgtctctttcctgccttgtagaatcaccagagctagagatgatgactgtacatggataaatagaaagctaagcagcagtgttgatttgtatgtaataatgtttctgttaggccattttatatattcagttttgtaaacacagaatgaaagctgaatgagattttataattggagacatgttagatggcctttgcttcaaaaatctctaatttctctactgtgacatagatttgtaaataggacactcgtaagaaactaagttaggatgggaaggaatggagggtgtatctgggaggagttaggggagtagtgggtgagtacaacacaattcattaggaactcaaagaattaatgaaagtataagactaagaagaataaaatattagattaaaaagaataaggtaatatctagtgtgctttgtgaatcatactttttaagcaagttgtacagaagaacattacatctgtgggagaaggtaaaagtgctgacaaataataaaggctatggaaatcgtcacggcaatgccatgtacactacagtgtgaatgacagtgctttatggctactgttgagtgcattcaaatacaccagaatgttactccttgattacattttctgtgtgcttctgccatagtaagatattaatattgtttctagtattaaacttagaagaggaaaggcagttacactggattttcagattttttttaacacatggggcaaatctagcacttttcacaacaaacatttgtggaatagattagaataaacatttcatttcaagttgaagaattttactgtcctggcagtgaagcatttgaaaatgtgacttctaaatctgggaggaatgtgtttgagaagtgttttagcaagattgtgttggcaggacttcctaagcaggtgatgtattataaactactgccttaggaagagtgaaagactcgggaacctgggtctaatagacacattatgaaagcctggaagagaaggtgactaagcaaccctcactgtggaggtaacagagagtgagtgggagaatcaaggtaatgccggtttccaaggctctctaacctggactgttatactttaatcgtggggtctcatctagtgagtggtttaggaggaagagctgaaaagcatcaagggtttggctgatattcgatggctttagggtgatgacaaggtactcagaaacacgttcagtaggaatgtggagattgtggttccagagtgcagtactgggtttaaggttgggagtgtggggcaggcaaaatggctccgtgggaaaaagagctggctgctaatcctaatgacctaaattacattcccacgacccaagttgtggaaggagagaaccagcttctgcgagttgtcctctgacctccacaagtgtgccatgacatgcacacagataattaagtaaataaattaaaaaataaaaatacatatatagaaattgatcactcatatgaggacaaaaactataaagccaaatgaacagtctaggggttggaacatagaatggcagggtgggataagggcatgtactttgggcacctgccccagcatggtaacaaatgaaaacaaaaaatccataagacttggggggaggaggagaggaggaagaggaggaggaggaggcgtcggaggaggcggcggcggcactggcagcagtagcagcagtggcagaagaaactgagtagcaaaatacagcccatggctaatggttttgcttttgtaaattaattttatttaagcttacttattttctttgctgtcatattgcttgggctgcttttgtgctatggcagtagattgagtggttggtatagagaatagttagttggtctacaatcatctaaaatatgtactagaaggcttttatagcaaaactttgttgacatctgttacatagatgcaagaaatgaagaagaggttagcttctcttgggtgctggcttggcataccctgtctatcccagccattgggagcagaggcaggtgtatctctgtgaggtccaggacagccagggctacacagaaaaaccctgtctttgaataaacaacaacaaaaagaaaacaaaagttagaggttagcttgtatcatcgatgactatgtagaattcagtggtttttgtgtgtttgtctatgagcaaatatttgtggagagattgttctgcatctggcctttggtttgtgctgtctaggggaggggctaaatagctagagattaataggtaaatggatgactatgaaagtgatgagtatcaaattttcttttgtgtgcatagagtggaatgagcgggagtttgagggatagagggagagaattttcagtacagagaaaatatggaaaagattttatggcactattctagagaggcagtgtgatgccattacaggaattaatggtctaagacttgaatgcagggagtgcatgggcctcattacaggaaacgaatagaattgtttgcggaattgagttaagaatagtaattgctcacacagctgtttttaaatagcaaatgtgttaggtaatcagcaaaaattcacgaagatgtacttgatagttatgtagaaaccgctgtgttcctacagacttatgatcctgatgggagccataaaaacaggcaaactagctaaaaacctgtgcatgcagttttcacattggtgtaatattgtattttttgttaaaatgtaagtgtagttttgttgtcgttattttctaaccattgaatctaaatgtaattattttgttcaagaagagtagaggtatgaatttgatgggtgcacaaagcattgaggtgtgtacttgctgaaagaaatgtctgccttcttcctagacagaagtgaagtgttggattgtgttgatttctgcttgcttcattttagtattcagctttattttattagcccacactgcctctgttcattttctccttttgtaccttcccaaggatgtagaaatacaccattaacttctcaaagacaatttagttaatccactaccactctaggtaaattgcagctgtctttcaaccttgtaggtctgtttaccttgggggggggggttatttgctgctttctctcgtgctgaagttgctctggtattacttcagaacgcatccattgcagttcccaggaagatggttactatgttttagatagttgcatgttttacagacgctagagagaaccgtttcttattggtgttctccctttacttctgcatccaggatgccctctgattacatttttttttttcatcttaaagatctactttcagtatatttttgaatcagatgttagaaatgaattcttaattttctttcatgtgcaaatgtcattattatctttagtcttgaaggatattcgtcatatgtatagttctggataatagtgggcactttaaagatgtttttccatgtctgccattatccagtttctgaaggcaaacatagtgatttgaacttttcctttctaggtaataatttcttcctggctatttctgaaatttaaaattttcgtctgttaacttgattttgtataggaatttcttggcatttttactgttggcattcaccacaatctttatttggtagatttaacccttacacatctgtgacttctcttttggacatggtttcttcagatgcattttcctgtcctattctctttgttctctcgttatacccaggttacacttctttgtttcttccattaggtttctgagatcttgttaagtttctattagtttctgatttgaatggtttctatttatctattataaacaccaattacactttcctgtcatctctattctgtcttatgttcttccaagaagttttattccacacattcaattcggcctcttagaaaatgttttccttcttctatctagtcctctgtccattgtatgatctttactcattgagcacatttacagcatcttcagtctgtgagaatccacatgtagtggtcctcttggctgaatagtgggttgcatttttactgtctacgacttggttttattatgaatgctctttgtggaaatcttggtttcttcatgttccttcaatattttctgttttagtaagccagtttttttggttaaaattaaaattctctgtttccttggctgactgccactcatgtctcatttaattctttagcctctgctgtcgacgagtttggtcttgcctgtgggtgtgtgctctagcttttaagatataaagtcagactttgatttaacaatcctatacacagaatcttttgtacttaaaacagaaaacccaaagctctatacctgataatcacttttcctgtgagacaacctgtcttactttctcttaagttcccttgtgcatttgtccatttttctcctttaatttcattaatgtatagcatagtaatgaaaggaattatattgtaattgaccctgtatcccaatgagttcctgagtaaacgtatcagtagatttatttcatctttatgcaaaatcttaaaagtactatgaaaaattgttggtaggttttcagatgtctgttagtttagaattgattgcaacctttaagtttatataaaaaagtatcatttcttcacaaataaaagtgaagaaactattgaagtagacattatagtgttagttatttgacacaattatctccagtcagatttttcttacaaatcacttattctatctccagaaagcagatggcagtcctataaagtatgtttgttatcttttgtttctatacagtggtactgagtttgccatttgacttactattagaataaagaacttctttcagggttagaattgactctgtgtgcaggaagtgcgcagtctcctggcttgttctaatctgacaggtgctcgcttgcttgctctgggcaaacgctgaccatacataagcacatgtccatgttgaattgctgctttgactgcctttgctgtagctgtctattctttgtttttccctcttcttttccttgtttttgactttttgagactctccaaaacctgaaacatatcccaagttctgtattcacttctccacttaccttagttttaattcatgatgtcagtttttagtagtaggtctcctaagtggcagataaagagagaatggtcttcattgctagtacccttgcaccattccatccttttcatctcagatagatctttcctgagcgtcaaacattgaaacatagtgttcataatccttgtctacagcatcttctggggaaaccaggttgtttggctataaaacagtctctcctttgacatagaacatgcttttgttttttgttggtggataaaactgtacagaaacttagacattcaaatgctaacatattaaaggggaaggaatagaatggacaccatagggatagtattttggagaatacgtataacacttacggtggaggcaatgagacaagtgaacaagagtgtattgaattcttcatggaaaagatgcctgccacacattggacttggccaaaagtttgcctggtcttttaagagtcttatacgtttgattttcaacaagtttggtttattccttctccaagctcccaacctcgaaagaatgtggttgtctattcagtaatttcagatgtgtttcttgtgtcttgtctctttttttttttggctcacctggaactcaatatatagatcaagccagccacaatctcaaaaactgcttctgcctcccaagtgctgggcttaggggcatgcctaccatacttagctgtgattgttcttattaaatgtttttacaaggacaaaaaggccagctgctttcattaaatccaaactattgtttttagaaacaaggtcttaagttggtttgatcgtaactgtggagtatgagatgcacccctagtctcagtcatttgaacacttacttggttcttagcagtgctgcagtttgttggaggatttatgtcaccacagggtggctttgagagtgtaaagatttccatttgctctgtcagcttcctgcttagtgttcaagatgtgagctcagattgaaattccagcctgcttacctactgcaccaccatattggactctggtccctctggaaccctaagctcaaacaaaccttcctataagtttcatttttttcatagtgttttgtcacagcaacagaaaagtaacaatacacttaccagataattaattaataaaaaatagcatgctaggcatgatggcacatgcctggaattccagtatttgggaagctgagctacaaatttgtgagcctgagctacacagcaaacacacacacaccctccagaaatccaaataatatgcttttaagaatggggcacatgcacaaaagaagtcattagatatgcactcactgataagtggatattagcccagaaacatagaacacccaagatacaatttacaaaacagaagaaaatcatgaagagggaaggaagaccaatgggtggatacttcattcctccttagaatagggaacaaaatacccatgaaaggagttacagagacaaagtttggagctaagatgaaaggatggactatccagagaatactccacccagggatccatcccataatcagccaccaaacccacacaatattgcatatgccagaaagattttgcagaagggaccctgttacagctgtctcgtatgagactatgccagtgcctggcaaatacagaagtggatgcttacagtcttctataaaatggaacttcaatggagaagctagagaaagcacccaaggagctgaaggggtctgcaaccctataggtggaccaacaatatgaactaaccagtacccccagagctcatgtctctagctgcatatgtagcagaagatggcctattggccatcattgggaagagaggccccttggtattgcaaactttatatgccccagtacaggggaatgccaggaccaagaagcaggagtgggtaggtaggggagcagggtggagggagggtatagggaactttcaggatagcatttgaaatgtatataaagaaaatatctaataaaaaaagaatggggcacatgaaataaacagttataatgtattttatgtaattgattccattcagaaaagcaggctctatgataaactgggtatgcatgtgcatgcatacacataattgattccattcagaaaagcaggctctatgataaactgggtatgcatgtgcatgcatacacacacacacacacacacacacacacacagagtttaaaaaaaagaaaacagtgcttcagtgttgatgagtttactaattcttatacattttaattctgaaaagaaacataattatgtttttaaaaattaaatagtcaaagtacttcaagttttttgttatttcttttttaagattttatttatatgtaagtacactgtagcagtcttcagacacaccagaggcaggcgtcagatctcattacagatgattgtgagccaccatatggttgctgggatttgaactcaggaccctcagaagagcagtcagtgttcttaaccgctgttccatttctccagccctcaaatttttaataattgtttactgttctcataactgttatttaaatctatggatcaatgaattactctaaagttgttgatttgctatataagtactaaaaatggaaaggaaagaaaataaatgggaatttttttctccaggtatttcaaaacaattgcaattccccattctattgtgatgcttttgcatttctctttagattttcttgttttctacattttatcagtttgtataacatccttataaagtttatcttcaggtgttgtcttgtttttgttgtggatgaagctttagaagttcctttattgctgtcatgtttttgtatttgtacagctattgtcttgggcagaaaggggtcattgatacaaagtgatttcttttgtcagtgccagccacgacattcagtcagtctggctgtgttgacaataaatcacagagctgtgaggtgaaaacctagccagatccgcgttactctgtaatagcccttgagcctgtccttgtccactattagtatttaactacataatacattagcattttgtttaattaatctttgccttttcttcatcttgtaaaaggtgttacaagtcttttgattaaaaattgactgtgtggtttccactgtctgagatggtttctatagcttgctcctgtcttttttttttaaacaaatatatttaaaacactatttattaatggtttgctataaaaacattaagataaatttttgtcttatgtccattagggtagaattcatcataagtttccaatatataattgtttgacaatactttacacaacttaaacaattatttggagttttatgtcatgttactatattctgtgggttaataatagtttttatctttagttgagtctcttggaaagcctgtattctgtttataatgctcatcacaaagaaaatgcttagaaagtacctcttgggtagcttgtggtcctggagagatataaactgtgtgcctttctatgacacattgtatatgtagagtctttactaaattgtgaattttaataagatttttctaagaacaaataaagtacttaatgtgttttgaacattgtttcactttaaattgtgcctggaatattatctgtacagtatttcctctttacctgtgggggcatattcctaactacctgcagatacttaaaactgaaaatcgtactaactcctccctcatatgtatgtatgtacggatgtatgtatgtatgtatgtatgtatgccagagatgaactcaaatttctgaaattaggcagtgagattatcaatagctaatctatacatagaataattataatagtagtatataggatcccttcttttcatctccctctccctctttctctctttcttcctttttcttcctttcttccttcctccctttctccctccctctctctctctctctctctctccttttttctttctgttgtttattttgtttgacagggtttgtttgtgtagtttggctgacctgcagctcatctctatagaccagactggcctcaaatcagagatccttctgcttctgccttctgagtgctgggattaaaggcgtgcaccatcatgccctgcaattttcttaagaaaactcttaggccccagtaaccaagttagtcaggaagacattctgctgtgcgacctggtgcctgactcttgtttgttcaagccttggactcaggttgccacagaagttttggcattttagctactgaacactacattctcacctacattactgatgacttctaggaatactctgaaagagttcctaaacttagtaatttctaacatccatttttttcgagtacaaaggaaagaaagccaacattgatatttagtatagaaattatcttagaaagagctgaggaatatatactgtacttagtaatcaaagatgaaaatcctggatttttaaatatagaaaatgtaggaataactagattgaaacatacaatgataaatgaccaatttagagattaccagtttttcgtggaaccaatgggaaggtttaggtatagaacctggcatcagacaaggatgatggtaactgatccttcatcctcctttaagacctttactttgcagcaacattgtgagtaacagctgtgaagagatggaattgctacccacaggattgctgcagtgcactctttgtcactgtggttagttgggataggtaatttgagattctctattttctgttaagaatattaactctctaatctgatagaaacacatgtatgaaactcaatattacatggctagctttgtttttatggttggagaactgaaatcttcatattttatatatggaaagtgtatggataatgggtagaaaaatggagacacttatgtgaaaatccatttgaaagtctccaaagaaatatcttagttctgaaatgtcatgatatacagagggtatcatttaggggaataatggtgagagtaactctgaagaaactaccttgctacatgctactgggtcaaggaatatgatatagccagtttcacaatgattctcataccatcatgtgaacttcgttctcttatgcactatctgaaacgtcagaaacatgtctttagaatttatattgtacactgtctgctttctttaggtatggatgagcgtggaggaacaacatcttggggaacaagtggtcaaccaagcccctcctatgattcatctagagtaagttttcttaagtcttggttacaactgtaatgatgattgggctgagtaaatgaggttttccataaatgaacttttcataacaaataaaggttatcttatgttgtggaaatatagaatatgcacagccttcatcatggatttaatctgctgtcctgcttttgaggtttattacaattcctatacctgaagaaatactcttggtattatccagatctgctttgcctacagtgctcccgtgatgctggaggagctcagagtacccatcagatgttctttgtactgaattgctatttctttgtttgttacctgtttcaggagatggttgtgacttttaaagctccagctttcagcttccttttcaagctgagttccagaggttatcagtattcgcattgggtactcagtagtcttatctctagaagccatgccaaaatagatgtaaaagttcttggttaacaatagaaaataagaccaactttgtgttctacacaccaaaaggggtaaagattagggccttttctagcaagaaaactatgcaaaattttctggtaaacgtttgaagtgggaccagagacagaaaatgaaagaactataaataaacactttgttctcagccactagtgcactggtagggttacaaagtgggatactttttaaaagactgtatgttactgatatttaaaaggcttgacacaatctactctggatgagaagaaatttctttgggctcatcgtttaaaggtagggatgggttggtggtgttgatgctgcaagactggctcctgtcagtgtggggcagcttgctcacttctcagctgatcaggaaacagaccttgagtaaaactagatagtagttcacaaagccttccttccttaccccacttgctgcagtgaggccctacttcctagaggttctaatttctagaaactgtcgtcaggttagaccatatgttcagacacatgaatctgtcaggatcatttcacatgcaaaccataatgctatatgtaaatgaatgagacatttcttttctcttacaggaaaccaagagaagatatgtctatatatctatacatatatataaaacatttaacttaaagtatcttaaagagtagaaagaaagaagcatgcagttggcttgtatgcagttgggctgcttgcttttgatatacttctgtcagtatcaaagtgcttctgaaaacaagaggttttgctgttttgttaggccacagtctaatttaaatatgttgggaaggactattattatttggaggaaaacagatagacagatgctgtatctattaacttcgtgggaatcggtagccaaaatagctgtcataatgtgaagtgctttgacaggatttagattttactgttcattcctggacacattttcatatcttggagactttaaacttgtagatgttcaattttttcccaattctgaagagagtttttgattctctgaaaaatatttgagtgtgtttcttgcttatctttttgaaattacagttttctatagtagaaattttagtatatgtaaatatttgaaaactttccttcagaggctcaagttcctgtcttagagtgcattagatgactccttcgtagttctctttacttcactctcaggctttctgagttcttctacttgaatattagatggggttttaggagaagaacatataacagtgtatccaagcacttaacagattgaccatcctgacattgtattttcatcagtgatggcactcaaagacaatcctgctgtttttgctgtttgatctataggtcacatgagaaagctgtcttctattctgaatgtattaattagcttatttttagtgtaggttgtggtagagaaaagttgaactaattctgtggtcagccagcttcctgtttaacccaggcacattcctagatacccagcttactgctcttaaacatcttttccaggactagaacagtcactgcagctaagttccttttatatatgacctctccaggtcttaatagatctgaaaagtagccctcaccgtatagaggcagttaagtttctggttattagaattactcacagaagcccattaacaaagaggttttttgtttgtttgtttgtttgtttgtttgttttgtttttgctttttaaaaaatattttggttttctttattttgttttattggatatttttcatttacatttacatttcaaatgttctcccctttcgaaatttcccctcccagaaaccccctatcccatcccacctccttctgcttctatgagggtgtgcccccaaccacccacccactcccacctccctgccctctcccacctctctgccctctcattcccctacactgggccattaagccttcacaggaccaacgtcctcttttcccatccgctgctacatataaggctggagccatggccccctccatgtgaattccttggttggtggtttagaccctgggagccctggttggttgatattattgtccttcctatggggttgcaaatccctttagctccttcagttctttctctaactcctccactggggattccgtgatcagttcagtggttggctgtgaacatctgcctctgtatatgtcaggctctaatagagcctcccaggagacagctatatcaggctcttgtcagcatgcacttcttggcatccacaatagtgtctgtgtttggtgactgtatatgggatggatccctaggtgggacagtctctgggtggcctttccttcagtctctgctccacactttgactccgtatttgctcctgtgaatattttgttaccccttcaaagtgtacgtgctttggtcttccttcttcttgagcttcacatggtctgtgaattgtatcttgggtattccgagcttttgggctaatattcacttatcagtgagtgcataccatgtgtgttcttttgtgattgggttacctcattcacgatgatattttctagttccatccattaacagagagttgttgagggagatactggagcagatatgatacttagtggtaatgttagaagtgatagaataatgttagaaaaagtgatagacttatgtaatgttcttaggcttcaaaccttagagggtgggagcactgcttttgtgtatactctcatgtcttctcttgtctgtgcattcttgatgctttgtctgtctgtgcagaacaaatatacaaacatgaaaaaagtactgtgatatgaaagatccagttttaaaacttcgtcaagtgagctccaggacagccagagctatacagagagaccctgtctcaaaaataaataaataaataaataaataaataaaaaataaaacttcgtcaaaattgaagcaccagagatgaacaagatttaaatatcgcacagtgcaggcctacaagaaatataggcaacaagtttttgtatctcttcttatcctttaatgcaaggaatattttctctatttgagattgtaccaggtataaaggccaggaaattggattgctctagttgattgctgtgttaatgattgcttgagtttcaggttttcctactttttactatctgtgttattctggacaggttatttaaattcactgcacatcactcatttgtaaaaagggattggtgttagctattttatgaagttgttaaaaggattaaatggaatggtcggtgtctgatatgcactgttctgtgagtgtctttagaattcatcttagaagtttgtgtctaatcaaatagaaacaaatgaatgcatttgcaagagatgctgccatataaatctaatgagaatttttgctcttttactaattaataaatatttttcctttcgatctataacaaatgttagtaacatcaatttcccttcccttgcaattattcattactttcttgaaaaagcacatctcttcctatgaaacaatgatttaaaagttttcctttttgcataaagcaatgttttatgcatgatagctgtgctgtacttagttaaatataatcaaaatttggaaaatcattttccttagcacaatacatagaacagacaattaagtaatactgagagttgcaaaaaattcttcccttgggaagagcaactggctgcccaatacctgatggtcatcactgaagaaatacatatgaggaatattacagagacttgagaaggttgtttttaggaatgcatatatgtgctcataacagttaatgaaaaaagaggccatgagtttgaaagagcaagaagatgcatatgtaagagtttgaagggaagaaaaggaagggtgaaaatgatgtaattatatgattatatagaatttcaaaaataaaaaatgttaaaaagtgagtaaacaaatttttataaaaaaagaacaatgatgaaaacctgtgaggctcataatagatggtagtctgagtgattggggacagctgtttatgcttacagacttaatctgctcataggtaggtcagagacttgtagacttgtatagtagatcctaggaaagtcacctttctttatgttttttttttttttgtcgtcaaaattatagtaatattacacagacctcaaagggtatagataaaagtggagattatagctatgaaatatttaatttatttatttaacaaatgaaaacaattactgttctcagtgctttatctcaatatcaaatacattaaatgcatcttcatggttatatatttcctgatatacacattctgtttctgagatgtgactgatacctgaatctgtaggtcttttaagtgaccatattgttaggtttgcccatttttgtacatactggtacccatcctagcctaaattctaccatgggaccatagagatttgtacctcatagcctgtgcaagatgcagaacttttttgctgattttatatatgtgtatttatatgtatatatgtgtgtgtatgtgtgtttgtatattctttttaaaataagaccaaatactttattgttcctttgaaaagtttataccggttcactgtcaacaaacaactaatttctatatgccattagctactatgagtgggcttattatttaaagtcataagcattttccatgtaaaatattgctgttaagatgagtatttaggtacttatcattgctgctactgtttttttttttgttttttgtttttttttttaaataaagaacattcattggcttgaactgagtttggatgtgtctaaatttccccaggtcccccaccccctttttgtattgtgctttgcagaacaaaatagtcatttgcattttgctctttttatttcctcagcttttgtcatatcatagaatttttcacaactgaaaaatgtgttagctgctttcatttatcctggtttgcagatgagaaagcaggtttggagagtgtgaaggtagatttgcaggagacccactgtttacatgaggaaggctgccctgtcaaagactgcctctggcctgaatagattacacttcaatgccagcatctcttggcccctttgccttgcctcagcacttctggattcaaagagtagtaacatttctgtcacaactttgaagggaaagtagaaagttaaaacaagaaagggaacgtgtggctggtgacaaataatttgggacatgatgcttcctagccagtgagggatgtggttcaggtggtggagtgttttcctagctctctcaaggctctggttttgatatttagcaccttacaaactgcatgtggcaccacccttttgagattatagcactttgggaggtaggtagaatcaggagaattagatagtcaaggtcaaattgggctacatagcaagtttgaggccattttggttgagagatggggagaggagggaagaggcaaggcaagaggggagacaggagaaagaggagagggggaagggaggagggaggaagacaacgagattcacatagcaaaggtagtgtgtagtgaggcagaaccatagaattagttgctcagtgtcaacttgatctagctgataagtgggagtgtcagtttctatctctgatacaacttagactttgctttgtgatactgaatgagttaatttttttaatctcaaactttctctctttttgttttcattgatagaaatggaatggcactaataatggctacaccactacccttccagtctgtgctgataatgcagaggggatatgtgttgatggaatgggctttaaaaaaagtccttcagttattttatgtatgagacttagcacagaatgatctcagggacttgttacttgtctttttggttgtgagcctagcccttaatgactgatcaatttctcccaagagccccagggactttcttctaagggatgagtagtaagcatgttttgaattctatagtacttgctctgacttttgcttccttatagcagtgcattcactgggagttgagtgtactcagagtagtgttcactttatagaatgctagtcacaaagagtgtgttgggtagaaagaagaatatgaacttaccaagagtttagagttgctggtcttgcaaagtttgtgtatagagccatagactgtgtaatttggataaagggtagaagaaaaactactcaactaaaataagaaaatagttttcacaaacaatgaaaactaaaaccaatatatataaggttatctggatgaagttgatgttattttctcttgaagcttctgtagtgtttgtgccagatgaggctaaagggaactttaattttgtttagtgctctcgccattcttagctggcattcagtatctttttcattcatgtaggagagcttggctgagtgccacttagtagattgtgagctagatatgggataatagagccttggatatcttcatgtactgtctatacaaaacacacagaggtcattgtgacctcactaaggggttatactggctagagatttggattgacttgcttaggtttacaggtcataggagccttagtagttgctagtagagcatagggacctttcttcttcttccactggaaatcgtgttatgagaaaaccccattgcaataagaatattaaatttatcctgtaatcccccaatccctcaatactaggaattgaacccagggccacacgtttactaggtaagtattccactctttttttgtttgtttgtttgtttgtttgttttgttttgtttgtttgtttttttcgagacagggtttctctgtatagccctggctgtcctggaactcactttgtagaccaggctggcctcgaactcagaaatccgcctgcctctgcctcccaagtgctaggattaaaggcgtgtgccaccactgcccggcagtattttactcttgagctatacccacagccttttcttttcaaactttttattttgaggctggagagacagacagctcaacagttaaaaatatttggcagctgttgcagagcacctgagttcagttcttagcaaccccatcaggtggctcaaaagcacttataacttgagcataggagatctcacagcctcctccagtctctgaaaacatctatacatacacatttggcatatatttcaagacagatattgtcaccccctccttcttcttaaagtaaactttttattttttatttttattttatttttttttttttgaggtagcatctaagttgtccattctggccttgaatatattatgtagcccaatcctcctatgtcaccttcctaagtagctgggattatagacctgtaccatcacacctgatttagtttgtttgcctttaatgaatttttctagcatgctttccactcccatttttaagattctgccagtggtaattgcaccaagaatttggaatgctaaaggtgaataaatgcatgttttagagttcaggaagtaggcttagaaacagtccaaacttgcctaaaaagttacactttaaagcttttaattcttttaaggcaataagattgacggtataattaggtagcaaataattaacttctaaaataattttattgcttgttctaaatatttgtcactttattgaggaggaagtgttgaatagggtaaacaagcatttctgtgaatataattgaaagagaaacaaacttcttgaaatagggaatggtgggatcattaagacaaaggcctcctcaccccggatcactaaattcagtagatagaaaacgtctctttaggtgattagtagatgaatagtatagggtaagagaagttactgttctctaggaaaaatgtagtctatctttctgggaatagattcaattaaaaataaacttgtatatagggaatagcactctaatggatccaacatgaaatactaaaaagaaatatgatgatctgagaagattaactatgtagatctgcttatcataaagtcatacttgggttagggaaataggaaccagactacaaagtaatggaaacaaaaaattttgcctaaggtggtagtgcttgtggaatagctgatatgactaggtggctggggagctgtgaatcctctaaactcttttctgccacagaatggtaactgtagaattcagttctcccaagttttcaggttgtaacaggtttgctattttttgtgttaaaaaactaccttgattgtttaattaaaaacaaaaaagttttttttttgtgtgtgaagaaaggctaaaaatagctttccttccttgtgtccatttgtcaggacttagatagttgagtttagtgttagcatcttcactatagcaaggaagatgtatcctcgaacctgtttacaatgtgttcttttatattttaagggggagtggtatagattttatggtgagtaggaagtttaaatgcactaattagaaaggacacacaaattttgaaatagtattttatgcctcttgatctcaggtacaaaacaggagatgaagcagttaaatagcaaagcaagacagaagggacaaagaattaaagtaagtgttttctatgtattgcatctatgttcccattaatctctgttttgttacgtaactgctgcttcaacatgttctagatgtgaagaaagctatgggtgagaaagggcgtgttttaaggttaggtttaaatgagtctggggagtaatgatgactcttagtgccattcagggagtcatctgcctgaactgagtctgttcttacttacgaataggcaaattatgagatgtaagcacctttaacattttgcagcatgttttgtaaactgaaagaaatcacataggtttaaattgcctaccattctaagacaaccaaagtgtctcttttttcagcctacccattcttagagcaaacatactgagactctgctattgatctgtctaaaaagcatatatttttgtcagtttctcacctcacgtgagtttcacttaagtccgtatgagtctacaatccttgtcaggagaaattgactttacagtttctactagggttttaggtttcatagctaatgagtggttgactgagatctagggcactagtagagcagtattatagctctgctcgctactagacctctgtttagtctcccaggacacctacttaaccagaatttaccaggtggccctcaagtatatttcaatttagtctttgatatccccctttttaattgttaaactagatcttgatagtctctttagtgtttccttagtttagtgatttcttatttatgaaaatacaatgtaggatagattccagatgaaaacatttttataactaactagcttacttttattaaactgttaagagttcctatttatcacagtagagcttacagacttaactttggtgtgtaattgctcaggtcttcaagagtatcataccaagaagccatttttaagattcttttcattttggagatgaggaaattaaggttttgagaagatagattaacttttaggaatggtaaccaggctagatggctgaagccgtccatccccttttactgtgttgacttgtgtttgcattcttagccacttagggctttaaggaacaatactctaaagattttaaggttatgctacgaccagcactcattcttttctttcttttttttctttttcttgtttcatattctcattggttctgttctttaatcatgtgtgtcttgaatatggaattcaagtcatcaagcttggtagcaagcacctttaccacatcaccagccctgctatcattatttcttacaaaaaaatattttatgagttgtaaaaattgagccacagcatcagtcaaatgacctgaacaaacagttctgatcttttagtttcttctctgcaaagatttttttcttaattgataattaaatagagaaagacttctatatagacagaccaatttgaaatctgttagcatttttcctctttttatttctagttacataacaagttatatatccattctgaaacaaagccttgttaaggaactttaaaagtctgaatgttctattgtaaagacaactattttgaagtcctggagtttatcccagacaagatggtgggctattgtgattttttaaatccaacaagaaatcctataagtcatgaaaaataaattttgtttgagttactgaaactgggaaaagtttgttatgttgcagatcttggtatttggaggttattgggggcagtggcaatggtttaagcctgcctgttcctagactcatattcttacaataaaatatagattggtacaatctaagaaaagacgccgtatttctttaaatctatttgaaatgtgtatgccatttgcaaaagtaagagtccaaaaggagatttcgaatgccagagggcttagccttgtcagtgtgctttccttgttacattcttgtgttatcctatactctagtggtcattctaaaatgctcctcttcaacacagtaactgacacaccagctttcctcctgtgaagtgaaagcattatttcagtgtatttcatatttcactcagctttttgtctttgtaacaaaatacctgtgaaaatagaggcacaaagatatatttggctccataatttcttgatgtaaactgggacaaggtatagtgccaaggatgcactcatttgcttgggtcctacctcctaggtttctgtcctgtgtcagtagctcagcaaataaagccccacctttgaacatgaccagtgcagtaggccatgaggtaaccagcctctgggaggtacttcagacttgcaccacaacatagtaaaatcagtatggtgctttgtacagagaacagaatatgtctttggtgtttaggaagttgttttatggtgaaacaataaaatatcagctgccttattggtcaaagaatgtctgaagcattaaggtgatttaattgttcaaaacgtcaaagagttctttacacaaacctttctgaactttgctttaccagcaggtgttcagggcactaacaccggtagctgtcttcctttgtaaggcctagactttcctctgggtctcccctgagaattttccagaggcccttactgaggaggagtcatgctgcagggtgtcttgcttgatccatttttctcatcacagacttgtttataagttgacaatgcagcatgaacattttcttgttaatgtctgtagctctttagggatggggccttgttagatttccccatctatggttggaatgtcaacttgttattgccattgtgcaagtcttggttgggggactgtcttgttacagtttcataagtgtaactctgtatatgtagaagatactatcttacagcagacctcctgatcctcaggttcttatctttctacctcttttagttagctggtcccagagcattagttatatgtgttgtgttgttagctgtatcagttagggatgggttgccctctctacattttgaccagttatgggttactgctacaaaaagaaactttgaagaggtttgtcagctatatgtaatcgttatcttaggagtatgagaacttttgacatgtatatgtctttaacttttctgaatatagcttttaataaatagatcttgtacattttctgtttagttaactgaatattttaaaattcttgatgctggtagttataaaatttcattttctgactcacatctaatatataaaatctacagtcttgttagactcacttactccttgtaatggcttttatgcatattctggacaattttctgtttggatagagattggcagtgcattgaaaaattttgaaacagacagaaagagatgatgcatttcagctcttgttaatgttgagaactgccttattgatgtgtatatggggagcggggactaaatgcctgaattagagaatactttttaagatatataattaccgtttatttgcattttaatcataaatacatttttctcttaatgtagtgcccttaagctctgacagcttgatagaatgaagcatatgtgcatacaggttattgtttccctctggtatggattaggttgtatttaattcgtgcactagatgtaattactttgatgtgttttgatacttgctaaactatcttaccagccccatacaatattttttaaaattgaaagagggaagtgggaggggggaagagagaagatatgcatgaggatatatagagagatgggcatctgggtattcagttctatcactctctgccctgttctcttgtgacagggtctctcactcaacctggagctaggctggtggccagtaaatccaagcaatttccctgcgttctttcatccatagtactgaagttaaaggtgtgcaaagctgtgcttggctttgtttttatacgagtgttaagaatttgaacttaggttctcagttttaaactataagtgttcttatctactgagccatctcctcccactcccctgaaattaagatttaaaaaattttgctacaaggtgatgagcacatacctgtaaaagccctagatattccgactgcgataggaaagccacttaagcttaggagaagcaagactttgttggtgattgattgattgatcaattgataatacagatatatcaatagaaggatcgtgagttataaaaattttaattatgtgttaattcagaaacagttctcattgatcatttcagctctgttttcttattttagcaaaggtcaacatttctaatttattgcaacataaagtgagcataaagtcagaagggcatcttatacatacattttgtcgaaccagtgctacacaatgtttactttaaaatgtataggttaaaacagacatttaaaatatttgttcctggcaaaggcaggttgatctctgagtccaacctggtctacagaacaaattacaggatatccagggctaaacagagaaaccctgtctcaaaacaaaaccaaaacaaatagcaacaacaacaaaaccccatttaattgccttaaattttaaactggaactttaaaattttcatatttcttcatttgtattttctattatatgaataatatggctaaaaattagcatttttctagagttagtacagcttcatgatttcagcaatatatatgctgtattgccttgttttcacaccgtacctaggaatggcagtgagaaggggtgcctgaaagaacactgaggtgcgttggattgtggttggtatttgtacagtgttagtttttaggataaaaataaactccaagggatgtcttttgtcagggttgtcctgttttatcatctttttggatgtgacagattggactataattgtggtccccagaatacatcttgcagcatcaccatgttataaatgtcgcttagaaacttcttgattatctgtcacatatgtattagacaaatataaaacccatttaatttggagttcgcattcccagaagattaaaactaaacagtgaaagtcatgatgtacatctataggaagctttaatgattcaactgttacttagcccttggaatctagtgtttttgttaaattaacgttaatctcttccccacagatgtagcgaggcctgcttttgttcctttaatgtcatcttgaatgtgagtgtgtagtctagagaatgatggatgctcagtgatacagcccctggagatgctgtgtggtctctcagtcaggcagggcaggttctattttatttggtttcttttcagttttcctcatcttctgtcatgattaagttatcaaagggcttggtatcacctgaaatttcaaaaattagctagaaacactatgattttggaggcagtgctgtggtatgtgtaggtgtctgagaaccagaaaaaaaaattgtaagctttctttcctttgtccctctcttgcttttaagaaattgtatttttgtgaaagaagtgtaatagctactatgaaatattcttagtgttattatttcaaggtatttataattttcttttcagacctttggatttaattagccattttattaagtgttttcttttctttctttcttttttctgtttttaatgacccagattccaaaagagtagatctttgtaagaatggtaactaaggaggaataggaagagaaaatcagccctcgtgcattataactcagaagtatggtggtgggttggtgattgtagtttgtttgttaagctaatttttttctttttaatgatatgtaaaactttcctcttgtatgcaataggaacatgtccaaaggtctttccttttggatgatttgaggtctgagagatgatttcagggatagtctattagaatgttcttagtcttttttttctccagaggcattgagaaatttgaagacagtggactaaggttagtgtttcctcaggaactcaactttcctttaagagtaataaagaatttttaaaaaaatctgtttattgattcattttttgttagggattggtggtgttgggtggtgtgtgtttgctactgttagcacatggaagtcagagaacaacttcagtagtcaattttcattttctataatgtgggtctcagattgaacttgggcttggaggcaagtgcccttcaatgctgtgagtggtgaataaggagctcagttaggagattctgggtaagcctgtgcattcataaggtgctactgtacactccttaatattttggtcttttccctccttagggttttacagacagccctcattacagtgatcacttgaatgacagtcgattaggaacccacgaaggcttgtccccaacacctttcatgaactcaaatctgataggtaagttgatgtctctgtgtaagcagtcttctcaagtgtctgtgcccagagaccctttctgttaccacgtcctgtgtaaataaatgaaagaaagctcccatgtggctagagggattcaagttttcctcacttaatcccaggctaaggaaccagcgtgtggaaatcagggtctttctttagagctctactaagagtgtataaaagaaagtattcatgatccttttagtttgaacagtgtctttgtgatatcacacctggcaagttctctgagccagagacacatccttcaagggcacttgtggtttgctgtttgtcttatcaggtatatttacgtaacaatgaaaaatgtgataaaacattgacaaattttactcacttaggaccatttttctttgggtacatttgataaaagattaatatttcatttatacactattagacggtctgtttaagtatgtggactttaattgaggatgtataaaagtgtttgcaatgaagtggagtttgaagggttagacctctcaccgacacctgatcgttgtgttttatcaccaggcttggtgatcattctctccttccctacctcacgtaaaatattctccctttatgtctttcttaatcagaagttgttcagtctgagatacgcctcgcgttgtgtgttataccccaccctccagattggatatcactctttttaaaaagaagtatttatccttcttacaaaatctgtttcaaaataatctgccttgtaacatcattttttgtcatgtttatactgtagttgaaaatattctaaatgccttatgttgtttactgtattaactgtcattgacatcaggaaaatacacagtttgtgtgatggacattaatttctcttcactgttggctactttgtgatagtaaaattgacctttgacaaccatgctaatctaagtaggttactcagtccaaggtcttggtggtctacagatgctttgtaagggatcttagcatatgcaacctttgttttttcttcactagtttgaagtagtgaaagtctgatactatagtgtggatttgcctatggcagctgacagcctaaaatcattgagtatgacacatgacctatataagcagtaaaatgtgtgctgaaaaccactggctttcaacataaatataaataaaagttatgttgattaatgggtcactttacatctaaaataaaacagtaatttcaccaaagaaaatttctacatttttgttttaattttctgttgttttcactttataaaagcttttattttactttaatttttttaaaaccttttccatcaagcagtatttgtactgtatataacaaggcaagtagaagttgatggtaaaggagactgtcactctgagatgtaagaattcatgactcctcttgattcagctttcctcatagatgtgacccacaccctctgcagttacctcacatgcacagatatggacctacgccactattaaaattgtggtaaataaatgaagtctttaggatatatgtatgtatatgtatatgcatatgtatatgtatatatgccatttcagagcatctgttaactaaaaactacttctctaattcagtttgaggttctgtttcctcatttggagcctttatggacatgcatttgttcttttttctgtttttggagaattattagagtacctttaaaggttatccctactctgtaaaatctacatttaaagtaagtctataagagtaagattagtgaacaggctgatttcttcactgttcaaatgaacaaaaattctcatttatgtgacctacctagtgcagtgagtctggtacgactatacagaatgtgttttatctactgtatttaaactgcccaattttaaagtattttacatttaaaggggatggggagaaataaccttgcagtgattgattaggtgcatgcatcaaaaagcattccttacctttattgttagtaaaatgattgtatgaatatctcagtatggcaccttacactaagtgatgtgcatagcaggaacttgcttttggaaatgaatatttcttgtagtgcagtaggcaatcagtaagatgtgagatgcagtggttgaactgctaagaacccaaatatatcgatgttagtactggatgaagttacaagagtctcttttctagatgtagtagtattaagggattttcagtggtagaaacacttttagagctctctgctggtgtgtgtgtggtgttttgagaaacactgaaccattgatacctgattcctgcaacagttaaagagaagagaggagcagaaaacagaagttgtcattgctgccagcatactaataagcattaaacaagaagagaaattattcatctaggatatgttattcttttaattattatgttgatctgtaaatacatttgtctggagaaagaatagatgataaaagtgttactgtctttcttggtagagatttgaaaactttaatgattacatttcaaaaatctaacaagtcttgataataatttgataatgaataattttccacagaaaactggatttctgtattagatattttgaagtgtttttatgtaggaaataaagctatattattatactacatcactgtttttttttaaaaatgaatttcagaattatcctgttgatttttcagtctgcaatgctagagagcttttctttatttcaaaagaaataaacataccctttgggtacataactaaacagttaacaacagacagttctgtttgagctatgagcagagtctggaccgtagctgtgagttgcagtggtgtcatcatgcagtttgggtaacacagtctccaaagctttggctcattctttcacttgtgattccctcattaattttcatagtttgccttctggggctggagagaaggccctagcagttaaggaacacttgctatgcttggagagggcctgggcttgttttccagtgtccacatggcggctccaggggacctgacatcctcttatgccctcaggatactcatatacttggtacactttcacatttttcttttttctttccttttcttttttctctctctctctctctctctctctttctttctttctttctttctttctttctttctttctttcgttcgttctttctttcctttctttccttccttccttctttccttccttccttccttcccttttacctttcctttcctttccttttccttctttccttctttccttctttccttccttctttccttctttccttccttctttccttctttccttctttccttcttctttccttctttccttctttccttctttccttctttccttctttccttctttccttctttccttctttccttctttccttctttccttctttccttctttccttctttccttctttccttctttccttctttccttctttccttctttccttctttccttctttccttccttccttccttccttccttccttccttccttccttccttccttcctttctttctttctttctttctttctttctttctttctttctttctttctttctttctttcgtttttcgagacaggatttctctgtatagccctggctgtcctggaactcactttgtagaccaggctggcctcgaactcagaaatccgcctgccttttcagaggtacagcttgcttttttttttttttttttttaacaaaacaaaactctcagaactgcaagaacctcttcaccttggttagcccactacatccagattcatatgacatgctcctgacatttaacaaataaagaacaccattaggctctggaaaactagctttctagaagaaacatggcagaaggtgctttgtagctgttcaaagaaaagtaaatgtaatgcagagtaaagtagcatagtgcttatcagatggctttgtgtgtttttataactcgttttaggtgtcttgctcagcctagtaccagtcgtaccagtcaaaagtctaatagttgaggacactggttttttttttttttttttttttttttaaactgtaagtctctacttacagccatcatttccttgctgaagtctctacaaccaagtttcaaggagaactctatacaattgatattgcccaaactagaatttgtaataaacccaacagtattatggagtcacactaaagtgtagaatcaccaaaatatcacaacagaactctaaacctaatgatttgatatatgtgatttttttttctgagataatgaaaatgacagtaactttaagggagccattgtagcttatcatctgacttcatggagtttcagaagagtgagtctttaatgctttctcaatgtgtagtcatttccagatctctgaaagtgtgtggttttattcactgacctgcattctcacaccctttgctgtttacttacacacacacacacacacacacacacacacacacacacacgaatggggcctagttaccactcaagaggccaaagcctggagagtgtacatggcccagttcttggagctcttcagctcacctccccatcaccctgcccccatactgttttagataccatgtgtacttctgctgtttttactctatagctttttctttctccatctattgcgtagcacctttatagccagtctgatctgttgagtacactttacagttctataatggcgttggtctgagagataggccttccttaagtattcccaaggcctgtgtctaattccagcccagtgaagatgaacttaaaatctgatgatacctgtagtaggagaaatggcagttgctgtggctatatagtcactggagaacaaaaacttaaggaatttctataaactttacagtttaaatgcattgaacttgaggggtgcaccataacacacagttgagtgtttttgggggtcatttgatttgaagaagtcacagggcatcatcatcatcagttcttaccttctccattatgacagctcagattcattgcttagagtcctaatgatgattcccacattgtttaataaaggcttattagtgtcttattgaaaataaatggttatacactaaataacgcttagttgtttggagtggacagggcctaacagttgtttccctgaggggctgtgaggtgggactaatgagacatgaaggagtctgtcagaggactagagatgagtgagtactactgccgttcccaagctgtgtttcaaagaaaggggttagtagtattttagatagctaccacacttttatacgagtttagttaactacgaaatgaaaatgaatttaaaactctgaaagttggggctggagaaatgattcagtggttgagagctcttgcagaaaacccacgttttatccccagcacccacacggtgtcttacaaccatctaaatctccagccccacagcatcttatgaagaggttctggcctctggcaagcaccaagcatgcatacagtgcacaaacatacatacaggcaaaacaccatgcacataaaattttgaaaattaaaaaattgaaagcatattttgaattgcttttgtttatcttatataggtttttattgttcaaaggtactcattgaattcttttttcagttagatttgtattttgtcagatacatcccatattactgaagccatgagcttgatctaatctctggcatacatctatcctgcctccctaacaagcacacttgcacacacagacacaagtagcacagtcatgcaaaagtaaattttaactgaccatagctaatactaagtgagagatgaggtttgacgattaagtcagatggaggtaaagaattttctcccttcctttaaaatgctagtcgcagttagaaagttcttaagcagttttcaggtttttaccagctgtaggaagttggcagttggctctgaagaagagcataaaggtttaggtgaagctgtttgggtccccagggttaggtgctttaggcaaatagctccctggagagagtgagtcctagcttagagccctctgaggtaaccagagggaaaaatagggcatgggttctgaggaattaaattgagaaaaacatcagtaagttaatgcataacttttcttgaatttttaaaattctgctgggtttgtcaaaattgccttgaatttgattagaagtaccggatgtatacttgaaatgtatacaaagagccagtaataaataaaaatgagccactatgccatcaaattttttgtttagaaaaaaacaaagactatcttattagttagatcatactaaatgggaacatgacataacaaaatgaaggttttttagaagtggtttttatttcttaggtagcagtataaagcagttcttagagtagggcttttttttttttctttcaaatcatgaaacctaaaggcaagcaaaccactgtttgattaaaaagggactgaaggtgaagtgttcacatcttgaccttgttgctttgcttccttcagtgtgtcatctggctgtagggtacacgtgtctgctgtgtagtcactgatgcatgcagaacggagcagagggtcatgcttgcccagtgggccctctttctgagggtatttgtaactggcagtgtagggccaatagagaaagctagaagggctaagatgtcaactggtataaaggcaataagattctgttttaggaatgaaagggacatttgagttctaataaaaaaacagacatttaaaaatattctataaaatagtttgtgaatgtacaataatggttattgatattgtaaataggataatctgttaaattccatgatctttaattctataattctttgacccaattgctttgtaaaaatattaatatttgcttttcttagttaccagatattttaaaatgttcttatttttagtaatttaagcatgttgcatggttgacatttagactagtataaataatttatcatagctaattgttcatatagtgttcatatttgtgttgagataaattccaagtatcactgtgttaccaacataagcagaaattattctccccaggttcatttggcttatagttttacatgaaaacatttcattgctcattcatgttattcagtattctgactaagatcattttcacatcaccacaactcagggttgcatatagatatgacagtttaccactgagtgaacatacacataggtctccattgaactctaaaagtaacaggatagaatagccatcaaactggatcattatagatgaaatactttcactcaagatacaattagtgaaaatatgtctactatggtagtagaccatctctggacatcagagaaagtgtaaatcacccctgaattttcctgtaataaaattgtaaagcacagctttcagcaggagttttcgtggtaagcgcaagggtaacgtatctgattagtgtctcatagagtgcttgaaagcagtggttccaaaggttggtagtgcacacagcatgagagagttaatcaacagagtaacccatctcaggtccaaacagtgatagttttgttgagctgattatgaagaaggttttactctgcagaatgatatttacagatatttgatgcctggctagtttggaagagggcttgtcagtattcttaccttgaacacactgacagagtaaggtagtatgatgctgacagacatggagtcatcctggtttgtattaccagattctgaccttgtgaatcaaattttaatttttattgtaaaatctaaacaaacgctgtcctactggagaaactcaagttgtcttttcatagtgccttgatttggtttttacaaattttgttgaaagtttgttttcaaatggggacattaaaactatagtgtccaacaaagaaaattatgcatgagttttaatgaagattgctgactatattcagtttgacaaaactttataggtttaggatgtgaatctagatagaatataaaaatgggaaacagcaacatatatttagtcagaatgatgactgaatgctttgaggctttattttcagaatattccacattaatgcaagcaagtgtgacatttcggcaaagaagagcatgcctgtagtgcccatggacagtcctacatgtgaggtctggagagcagatattttttcagcgctcctattcctggctgttctgatctcgctctagtttttttgtctttacagtggagcttgctcaccacaagagctggctagctgagtaggcatctagttaacttttaagtgtaatgtatttcttcactctaaacagaggcatagagaagctgaatactagttagtttcaagttagtcttcatgaagacagtagtacttttggctcttcctagaaatttgttgtgagccttaaaaggatgttttagattaattgagagaaagtggtggcaagtactgttggtggaagaccacgctgaaagtgatcagaggacatcctatctttgtggtttgtctgtgtggagtagcagaataggttggtggcagtgtttactttttttgaaattaataaaatactttgtaagtagaagagtgccaaagggaagagttccaccataggccctgtttccatgccggagaagactagaaccttgaaggtaattatagtcgtccacttggagtttgtagcttgtgctttcatgatggaatgtgaaagggaaggagtcgtacttatgcactccctcattcttcaaaactgagggtgtgacttgttctgtaagtttccagtgcagaaacacaagttgctgacaattgaggacctctctagagggtaagtgagctgtgggacgggaaagttactcagcactgcattagcctgtggtctgataatatttacattttcttggtgatctgacaacagcacaatgtaaagaaactcaagtagcatttttaggaatagctcctaagtaagctctgcttgcagggaaatagctgctttggcctgtgacttagaggatgaacatgtctccatggaatgccctcagctgtcgcaagctacaacttgatttcagcagctgtttggatgcaggcactgcagtgggcaacttggagctcacattgcagtgctccagcagtgtcgcagttgtggttccatcctttcacaaagtaccagggaaccttgatcgtgtgaggaaatagtgtgcataaacaaatcattttttttgtgtgagattaatttggtatggaacaaactaatactttccttagaagagttgaaatattacctgtcttcacattatattgagtgacggtctctgtgtactaaacactgtggtcaggagtgccagaatatggtatcaccactgggagttcacactttgtactaaataagttcctaatgtgtagaagtacacaattttcctccagcactcaggagatagaggcagatagagctctgtgagttcaaggccatcttggtttacataacttgttctgggtcatcccaggccacatagtgggatcctttcttaagaagaaaaaatgatataattcacagtttatgttctgctacattttctttatgaccacatcataagctgttaacaccattctcatctttggccttctttaatttttctagttaaggaggagacaaagcattacttgtcttatgaagtaaaaggagaaaaagaaaataataaatgtaacgttagctgggctggggcagagtgctgcagatcttagaacactgctttcctgagactgccattttccccatgctaatgtgttagagacttacactaaagctctcccagtggttctctgctttgtcatgatttattttagcatcagaaaggccaactctagtgttgcttattcctctgccttgtctccttatgttctttctaagcacagacacagcccagtccctggcactgacataacaaacatcaataacaacttctgtaaatgttaaattaaaggacaaagtgaagggcagtgactcattaggatttttttttttttttgagcaaattaactcctcttcctgctgatgcatgttgggaaatgattggctgtctcttgagcgagaaatggttctgttagggattgtgtggcgaggggcttctttgctgtagcaggcatttggatatggggtagtgctttttgttttaaatagcccttttaaagctttaaaaatatatctgccaagttttaccaattttgagatgatattaaccttaatttattcagtacttttatagaaaagatgaactttgttttaaagatttatttatttatttttatgtatgtgagtacactgaagtcgtacagatggttttgagccttcatgtggttgttgggaattgaatttttaggacctctgctcactctagatggaatgggctggatattggtatttttcaccttgacagctctaattaaaaattaatctagccctcttctgctttgttaatgatcctttatatctcttgaaaaaaatcagccagtgtttgcattgctacttgaaactttcttttctttctgtttccctgccccacttccttttttcctttattactagccttgtttgtttcagtacccgagtaaatacagtgtactcacacatctcatattactcttatcacagaccttggtcttaatactaacctgtgtaaaattacctactgagtttgtattctttcatgcttgcatcattttccaacattacctttaattaaattgcccttcacatctcttgataatccatcagtttatcagtgcttattatctctctacttgctagacactatgttagctacttgaacacttattaacaatgaaagccacagtgactttgaatgttagtttaaaattaatctttaccttttgtgagaagcaaagcccagatttccatcttaaattcagtgctactttttctgtgtccatggctttctatgcgtgttacagtagtcctcagcttttttgtggttccagttaccaacaaccaactacagtttaaaaaataaatagaaagttatagaaatttacaatccaaatgttttcaattttatgcctttctgagtgacacaataccatctctcaccaggatgtgaattttgtccagtatgtttgtgctgcacaaattacttgcccatttagtagccatcttgtggttttgttgtgatcatagtgctcatatagactaatgttgcattattgtgcagtgtcattcacatgattcattgccccatacagacatggtacaatctcttatcattcatgaggagggaagtataaatacaaaaacatttgggaatgtagaaagagcatattcatacaacttaatatattgttatattacccattaatctgtttttaaccaagaagtggctgtgcctaatttataagttaatctttatcacaggtaggtgggtaagtttaggaaaataacaagtttatagaggttaaacatagctaatctggaaaaatccagaaatgtttcaaaatgtgaaatgtaccttgaatggcaacatgatactataatgaaaaattttgtgccagacatcatctggtgatcataatcagaacatgtaccattcaggacatttttgtttcagactaccttgtgtatccgtaagggctatatgattccataaatggatttcatatttatgcttgtgttctagcactaaaatattagccactttgtagcaaatgctacaaaagttcaaaagctaatcttaaaatctgaatcatttttgattccagacattttgtatatttagtctgaacagggctccttagttttgtagtttcaagtatcctgaaacataccttccaactaggtgtagctactgtgtagtcagatttcctattcgtgtaggcttgttttaggtagcagattttccgttcgcgaccccagactttttacttactacctgttgtacactggctatttaatagttgtttgttaagttgtaggtaaattttatgatccctgcttttatagtataatcttaggacttaaactgcatgagttttgatttgtgactacatctgttcattagttacatctgttcattagttacagacttcttgaatataattgtatcatatatattattgtgccccattctaactaatgccaagacacaggagtataaaactgaccctttccttgggtcacacagatagtacatggggcagaagagttgctggaagagtgtgattaagtaattggcctcagcaaatacccatggctctgctttatatacaggctgatagtctgcctttatttgttacttgacctttctcccttactgcttttaatgttctttctttgtttagtgcatttggtgttttgattattatgtgacgggaggcatttcttttctggtcctgtctatttggagttctataggcttcttgtatgttcacgggcatctctttctttaggttggggaagttttcttgtataattttgttgaagatatttactggccctttaagttgggaatcttcacttaggtttcatcttttaattgtgtcctggatttcctgaatgttaggagctttttgctttttgcattttctttaactgttctgtcaatcttttctatggtatcttctgcacctgagattctctcttctatctcttgtattctgttggtgatgcttgcatctatgactcctgatctctttcctaggttttctaactccagggctgtctcccttcatgatttctttattgattctatttccatttttaggttctggattgttttgttcagttccttcacctctttggttgtgttttcatgtaattctttaaggcatttttgtgtttcttctttaaagtcttctacctctttaccagtgttcttttatatttctttaaggtagttatttatgtccttcttaaagtcctctatcatcatcatgaggtgtgatttaaaaccagagtcttgcttttcttgcttttttgggttaactagggctcgctctggtgggagaactgggttctgatgatgccaagtagccttggtttctatggcttatgttcttgtgcttgctttttgacatctggttatctcttgtgttagctggccttgctgtctctgactgtggtttgtccatcctgcaaacctgtgtgtcagtactcctgggagaccagttctctccaggaggaatttaggtatggagagaggtacagggtcagctctggggtacagacagaaaccagaggaatcttgtcctcagctgatccttggttcctgtgtccttatggctctggaagggttcctcttgggccaggaatttgaagagaagtggtggtcttacctgtgcttgcaggtgtgtaggtactcctgggagaccagctctctcctggcagtgtttgtatttgtagctctgtggcacaggatcagctctgggcacagatgggaactggaagactcctgtaaggcagctccttggttcctgtctgtggtttgtgggttcctctgagcagcagtgctggtcctacttgggctcacaggcctgttgcactcctgtggaggcttgctctctcctggtgccacctgggtatggaatcctgtggaataggagggctctaggcgcagatggaaactggaaggccggttccaggcaggttcctctgagcagcagtggtgttcttcctacctgtgctacctgccctcactgtatctgactggagcctgtccttcctgtgatcctgggaatgtcagaactcctcagaattcagctctctctgggattctgggatcaggtgatcctgagatcatggtgtgtcagagcttctgggagtcaagctgcctctggaacccttagaacctggtaaaatctcactcattttaaaatgacttttcttactttgtttttctcttccaatagttttctttctttttcatggtgtttttaagtcaatgtgaaatttgtttatgctacatactatgctctttccttaatcttaatctggttttgcacaacagagaagagtttgatttactcagtcacagaatttttagtgaatttatgccaaaatgaacgaagaaacaagaacttcccatgataatgatggtatgatagctggtttatgcccatgtgtcattcagtgtaagaaggctctcaaggcactaactactctgcccagtgtttaggatacaactcgcagttactgctccagcaccttgagtgttccctgccatgaacctgtaagtgagtcccccagttaaatgctttctttcataagagttgtcttcatcgtggtttctcctcatagcagtaggacagtgactaggacaactaattaaatgaaattggttggttttgaagtgttaggggtggaacccagggtttcaagaatgcaggcaagcgcttaaccaacaagctgaagcctcgtaagggaattcttgagttcaaaaacacctgaggctttggcagtagtagcaagtagttatcatttttattaatgaactttattttgaagctgaaaccactgcttaacactttattaaaatttggggtctgaaaatagagctaagtaaccttttgagtcctgtggtaaaggtccttactggtactctaacctctcccttttctgactaggtagacaatccctccctacttgctgataatgaaacattaccacacctctgacgtgatctggcatctcccattaagaagaagagaactaggcattaaactcaagagaacagagcaggacagttttatttacagcattaacgtgtcttttccattgttttattgaacattttcacatgcttctgtctctgtttctgcttctcctttgctccatactggcttgacattttcatttttagtgacttgatttaagaaaaaatttaagaaaatattaattaatgagtatacctataaataatactgaaagtggtccaagcctgaggggtatgtgtatggcagatttgggaactagggttatagtttatctttggctatgtttgctttcctagcattctgggctgcctgacagatttctgagctgaattactaagacttttttgtgaactaagtcagatttccatagtgatccttagtttcctgagtgttggcaggtgataggtttcatttccttgacaaaaatgaagaaggcacaggcagcttcatcccaggacgctggtctcctgtgctggtctcccagcaataatgtcctcagtgtgcttaagtcctagctctcggaactattaatttttcctttacttggccacaccatcatgattttatactttgtgatggctgcgcattgtcttaccaggaagaattacaagctggatgagagagtggaatacagtggtcacatagattccactgggagagtatgcttacaagcctaggatcaatggccttggtgtgcagggaaacctgagaagtgtggtctgaggctctgctctttctccagtaggatagctcagaagtcaacgaggctgaaaagttttcagtatttctgtaagtttaattttcctggattcataaatatgatatatatcaagtgaagttaaagcaaaaagcaaatgaattgattttgtgctactacactgggtgaacctgcagttataatgagtacagaattcatgaaaatagaaaattattatatagtagcttttaaacccaaacagcatactgcctaacagtgaacctctgatcagccctgatggtagactaagttttattctattacttttcaatccaaaataatttctagaaagcaagtagttgtctcttttcagagatgaattgaatacttgtggtatttctgataaatatagaatatcctatacttaaaaatacttacctgcataataacagttgaagattttatcttgtagcactttaaataaatattatgtatatctataatgtactatagatatatactctgatttttttgttttttgttttttgagacagggtttctctttatagtcctggctgtccaggaactcactttgtagaccaggctgggctggcctcaaactcagaaatcccacttcctctgcctcccgagtgctgggactaaaggcatgtgccaccactcctggcttactctgatttttaaaagcaggttctgactagtttcttttggttttgctttagtttgatgtccacttttcaaagatgcttcctaaaaaacaagaagggccagagaattggtaaagttggttgaatgtttgcatttcatgcaaaaagtcttggcttcagttttcagcattatataaactgttcatagtggcacattcccataattcctgcacttgggaagttgtggcagaaagatcagaagtttgaggtcatcctcaattgtatagcaagtttcagttttagcccaggctgagctatctaaaaccctttctcaaacaagcaaaaaacactacctcttttctcatactaaaccttataagtaaatatgtaatatgtaattgatctctgcattattttcaggtatattgaaagacctctgagttttcacacagcatctagtatagcatactctaactccatgttactggagaatattgctcatttagtcaaaaaaagaaaaaaaaaaacccaaaacctaaaactccaaactacccctcccctttattcacctactagaaaaagctcagttgctgaaagttaaatttctctctgataatgctagtttcttggtcagattctgtcttatctgctaacgtaccttaaaacaggtatcatctcccagtcttgatttgttatctgatcatctttctcattccactgtgagtcgtttatgcttactggaagtttcctttgataaggcccccgtgggtgacttaaagattatggagattcattgtaataatctttgattgagtttgtccaacattatagtctgtttgggggcaatgtatacacccttttttaaatggaaacaaatctctcctcaccttttttatccatagacttactaaacatttataaaatacctcaaatgtgcaaattctaataaactttgaggagaaaggagtgattagtgaacattttcactgttaatagtttttgatcatccaagaatgtaaactactaaatgcagcctctaagagagagtaccacttacagaaataccaccataattcagtgtatgaaattttatatttccttagagttgatctccttaagattgtcttaccagggcttccaacagtggttcaagtacactgcgatcccctgttgagtctgaggaacatttgtgttttggtgaatgagtgaacacaggagtgtaattagaagtaaggtcagttttctgcttagtgatctcatggagtgaaagagtaaaaacagctgcagagagcatcccaggggcaaagtgctgatggagagatgtgtctctaatatgattattcactgcatctgaggtgataaattgattggcatagaagattctgttatggtcagtgttagctttttctttttctttttttggttcagagaaccatgtgttaggattgctttatcctttttttaatttttaaaatgtttgagataggatctctctgtatagcacaagcttgcctcatttaaccgctggatcctcttaccttagcttcctaaatgactttatttaaggtctgggctaccatacctagccaaatacgaatcttttcatatttgtttgcttgcttgtttgaggaattttaaattaagtacttttccttaacatcaaattatctaactgaaatcagagcaattaaatgagcttactaatctcatttaacaagtagtgttctgcttttaaaaggagatagtgttcatagatgaggctgtattgtgttctgggatgagtaggttgattacatggggaactctgaacttctgttgaggtgtacacagctcactggctgtctcgagtatattttcattgcttttaagtcagcttcagatacagattcttggtacattttcattcatattaatagtagatacctataagcatggagttggttagttacttgctattcaagtgaaaaaaataggtagtttcatttaattattggattagaatcaaagccatatttagctctctttacttgtttacttgagtaaggcgaaaggaagtagcatttcatgcaggcctgtcactgctctgaccctgcattcgatagctctgtaaaagtgttattttttaaacctttgaaactcagagagtttattgtattttctttttcttatttttctgtggtaactgctattacaattctatgcttcagtgttttgaataataattttatagagatatgatacactataataaaattttcccttttaaagtacccagatcaatggtttttaatatcttcagacttatgtaatcatttcctctgtctggcttcagaacactgaaacctattccagaagaaacctcgttcttacgagcactgaatttctattccgttcagccctggcaccagctagtttcattctctccgtggacttgcttattttgggcattgtacataacaaatcataaatgaaatggtttttgatgagctcttttcacttagcgtggttccagggtttatgactatattcccttgtatgaatatatgacattttatttacctacccatcatttaattaaagtttgatttgtattaccttctggttgttaccagtgtagtgtacacttttgtagacatgtttccaattttttgtatataattatgtatcgttttaagtgaagtttattctgagaaatatgtccttatatacaaacatagaatatatttaattaaacagtgtggcctcttgatgtattcaaaagatgtgaaaaatggaagacgaataaggcttctgccagttaaaaactgtggtgtttaatagtgtactataaaagtataagggatactctcaaatatggaggcatttaccacacctgtgcacacttgagaggcaaaggctgagaatcttttgagctaaagaatctaagaccagattggtcaacacagtgagatcctgacctcaaaagaaattaatagtaaaaagtaaacaaacagtaacattattttgttcctcgcattgttgggcatgatgggctgactttccctagttgtatgtgctggaccttgataccatggcagcacaggacaggtgtgctgcacccacatcacagtgagcacatgactgtcacatttccttatgacttgacgatggcacttaaagccctgttttctgactcattattgtctagctcatgactatacctaggtcaactctattgaatcagatgaggaattgccagagttttacaaactcatttcggctcttaatattttttttccaaaattcatctttaactttaaacatcatagtaagtggagacctccctgaaatattgatgtgcatttccttcatgactaataattctaggcaacatttcatgtgcttgctgcccatgttcctttttagtttggagaaatgtcaccttgggacctatgcttcaactctgaatggagatagcacttctggcctgttttcttgagattgatgtgatgagagggtgtgtctgatgttcagcgtggcctagcacttaggagagagacatttcctaagtgattattacttccttcccgttccatctcaaacctcacagttgaataggctgaggtttagagggaggagccacataattcaccagagtttattgggtaagtgtgaacactagttgcaaatttacagctttcatcttgcttctggattcagcagtgttctcactatagctgtcctcttttgcccttgatgaagtttctccatgaaactctgtctgtaggtcaacttaattatgcagctgttctttatatctttgctgcaaagcaaacataactggtttaaattcaaagttgaatttaagaaaatctttctttcaattgacttgcaatatgttgtacctaagtaaacacatgactgtctttttcttacattctcacctctctagggtaaaattccgtaacaggtgaaaggctcaatttggatatatgtcttacatgaccacaagtgctgcatcagctaaaactgttgagaagctctggtttccgatgatgatatatatcactgctaaactagtctgtgtctggtttataatgcacaggacagctgactttgattgaccatttggtttgtttgtggagtctagagaagtgtctgaaaatcatgtacaaaatgaatttctcttaaacattgtacaactaactatagaaaaaggaaaggaaaaaaaatctttccaaacagaagagaaactaactcttctggtttgattgtattctggttttctaaggtgtattaaagggagacagttgaggaatacattaagccatacctgcatttaattctttccataagagagccatcgcttatagctgcctcttgtgaggctatgccagtgcctggcaaatacagaagtggatgctcacagtcatctataggatagaacacagggcccccaataggggagctagagaaagtacccaagaagctaaaggggtctgtaaccctataggaggaacagcaatatgaactaaccattacccccagagctcgtgtctctaggtgcatatgtaacagaagatggcctagtcagccatcattgggaagagagacccttgttcttgcaaggattgtatgccccaatacaggggaatgccagggccaggaagtgggagtgggtgggttggggagcggggggagggggtttggggaggagattaagggacttttgagatagcatttgaattgtaaatgaagaaaatatctaataaaaattgtttaaataaaaaaaaaaagatagccatcagttttcatatgaaagactgatcttttaaagcagtagttgagatcagtaatgattacaagtcaagataagagctttagaaaatgtcttaatttgagtactttggattagaatgtttttatattaatattaaattatgtgaaaaaatatagtgtacgttgccagatatgtcttatgcatataatcttcagatgcctgagatgtgtctttctaattttcttaattaattaatttatttatttacaccccagattttattctcctcctgttccaccctctgactgttccacatctcatatctcctcctcgcacccctgtctccatgagaatgtccccacccccccacctcaccagacctctaaactccctggagcttccagtctcttgagggttaggtacatcttccctgactgaacccagaccgggcagtcctctgctgtatgtgtgttggggcctcatataagctggtgtgtgctgcctggttggtgggccagtgagatgtgtctttcaaatcaagaaatcaacacttagaaaacttatgagattgattgagaagtcacaaagttaatgtcacagagatgggattctgcctgactcccgagctcttctgttgttttgcctttgaatagcattttgtattcatgccagctaaacaattgaaagttcagttttatacctcacttcctgaaacatcattaacaggcaaactttttaaaatgttttttgttggtcagtaagacatgctatagttatagccatgaacactgttgaattgttcctgctggtttggaaaagaccagtgaccattttttcttctttttccccttgtctgttaaatcagtatagtaatctacagcttatttcattttgttgcagtagctctaacacagcactgcatgaaaagcaaatttctgtgtaaatcatttcaggaatttatttggaggtgttttttgctcattttgttatttgagagtggtattgttcctgtatttgtgaaacaaggtcacttcagctctgtattactttgacttattccttttgttgttggacattaaacacagtgcatcctgagcacatatcctaccattgaacttcagttctcatactcgtattttgctgaaggaatggaattcatttacctcctcatgaaaagaacccctgagcatccatccttggtgcctgctgttaacaacacacacatatcagaacgccccttgccacactttggaattggcatatctccttgtcaagcatgtcctgaatacttgaaaaataactagacagtgttttagtgctttttagctgtgtcaggctgcagaggaggaccatgaattaggacaaatgctaacattctttctagttactggttttatctagcttgataaaagctacataactacaggctgtccttgtcttcctgctgtttggcttacaatttttactttataaggtttagtatgcgttcagggaaacggttctgagttttgattttgatgttttcctaggctagtagcatatcattaacattatcctggtgaagttgaacagaggtggcaagctgtaaacacatcaccttaacaataacttaagggtaatttgccactaagatttttttgttaatagaaaatactgtcagatatacctttattataaaataggctttgcactagattttgtccaatgatgggctataatgtaatgtgagtgatttaaggtagacaagctaaaatatgatgtttagtagcctcgatgttggaatgcatttttatctagtaatacttttatttatagtggttttgccagaatataaagtcgtaatcaggagcgtctctaacagttaggtcttgacataaaatcttaagtaaactgtctgaagttttgtatccttttctagtctaagatatctctatttggagaaaagttaatttttctttttaaagttgaatggtagatagtaatttaccagcaagattattttttcagttgtctctttgtgaagtaatcaacattgtatttttctttgtctaatcaccagactcctttctctgttaaatatattttattttatgcatacatttttttcttttggtctgtagaatatattaccactagtagccttatgtggataaaatatggtattcatttctgtaagaaagtaaattcatgtatatttagaatccaaatctaaaatataaattaattttgtttcttatggactacctttacaggatacaaaatatgtatgatattagataaaaatcacaagtcaacttttagggttgtcacaaggttggcttagactctgctacatgtctatgtgaaccctgtctatggtaattgatgttcctaatgggttctaaggacccgggcagttctaaactgccccctgaattatcaaagagatctgctgtttaagagcagatgtatgcccagccttgttttaccaaggatttgaactggtttgtttgcttttttaagggtgaaacatatattttcttgcctttcttttataattaggtcatctgattaggttatccagaggatttagttatcccagatatctctgccagcaagactgagtaaaaggaacaaacaggagctctaactaaccaagtgcatactaaccaaggaactctgagctgctagagttagagcagtgtttgctacaattaacctatttctcttcttatgtaattatgaactgtacagagtcaaccctcaaacactagaaccataagaggcagacagaacccatcatacacagttagggttttttttttactgctcaagcatctttttttgttgttgttgttagattgtttttagaaggatacagagcctttttattcctaatacagaattaccaactatccttttattttcgttctcctttgtcctttatctctccaagcatattattgtttaacagttgctttgtgtatgataccagccttgcatgccaactttaatgtggcagaatgaaccatgttgctgttgatctcaccctggacaaaatagccatctttaaataggaagaagtttctagcttcaggttgcttcagctctgcatgcttgcctagcctgccgtgtaaagtcagttgcttcactctaaacagcactgtattaatatgcacaacatgaccattttcagtagaaggttattagaatgctagtttgtatcctctagtgaatgaaatgatgtgtgattatgaagtcatcaggcatggaccagtaagactccagagagcctgccccctccgaggtcctcagggtgccattgattggtggccatgtgtttgtgcccgatagactgtgaaatggtgtgttgctacacggctgtgttgcacctgcgccccaccgaggtgattgattggtttggtcatgtggaatgttcccatctggtctgcagtaatgtggttttttttttttttttttcaactgcgaatagcaagtactggctggatagttacagcaaactgtttcaggagctaaataatcctttcctctgagcacaagtcaccatgtaaaggggttttggttttttttttgtttttttgtttttttggttttttttttttggctaaccctgttttatgaatagtaattctccatcaggttcttgcccctctctctaggatattatatgcctctttcttaacagattttgtctccacctcacactagattaagatacactttatttctgaattgtgtgagcttaaaacagattcaattctcctttgctgcttgttttcctgacaattaaattctaggtggctttcaggtttttttctagagatggtttctgtgatcgtaattggattatcagagtactgatgtatttttaagccttcatttaacctcacaaaagtagtcctttatttatcgaaaactactgatgttgcagtttaaatgtcaagaaattatttattaggtccttttaaaaaaagattctatagttacgttgggcggtcttgtttgatatttcttaatcttagtcctttttcataattgatctattcattctacctaatgactaattacatatcagagcacatcatcagccacattcatcatagtagaatgtaataatcaatgacatttcaacaaaggaaaaaataaatatgcaaataaggcctcattaacatttgcatgagttgtttgaataatcacgttgctgacaaggctgtaattaacagaaattgatgctgagttcagtatttgatagtgtgttttctcagcattttattgttgtcactgcgggggctgaaatgaagttctgctctacttataccttgactagagttgatgtgccgagtaccaaaggcttgtgggagcccttgattttctgtgacctgctcttaaatgcatatgaagatactttacttaaattgcgttggtttctttttccttaataaagctcagttgcattttaacaattataaaatgactgtagaaagaaaacaaatataaggatttagagttttgttattttgccagaactgatttatctgaatcactagaatttcaaggtttagttttgctcataccatggaaaattgctgtcattaatttttttccctcttaagtctgccccagtagatcactctggagaggttggtgtgcttactgtaattgaaaatcacttgcttaggccaacagcaacaatgacaaaagcctaattataaaatgcacagtttgagggtgtgtgtgtgtgtgtgtggtgatttttttaaataacactgctccccacattcctcctccttttcctgtactgtttcctgtttttgtcatggatattaactgaaatgtgctaaacacaataaagctgtttatgtcagttttttggatgactgcaagtgctgattataacaagtttaaggaatttcctttgttgaatgtgtacccgtgccatatggctcaacacggaacattaacttgacagggataatggattgtgctgtatggagacaattttgcctgcagctttcctataactcattctggttggggatcacaggtttctagtatgggatggagcaaacatccagatggatttactttacataaaagagttgcatttctttttatttcctctctgtaattggaaaaaggagatttttctttaaagaagcaaaatattaaaaagaaatggaagatttaaaaaatctaagaaaagcctggatttttgtgtaatctttttgtaaaatgctttgaaagatgattatttctgtgtatttagtgcatgcatttttaagtcgggtttacataagcttatgacactatcttttgagtctaaagtggatcttcttcccttttatatttattggattgcttcaggactgggaacaggaaaatcagtgccttttctgatgttctttagttatgatcttccgaagatcatgtgcatttgtaagtctttaaaaagtctctgcttttggcaatgatattttataaatcataacaaagtttattggttttgttaacagtaatgaagcagaattgctgactgctggttccttggttcattctgtatctctatgaaagtcattctaattgattgaatgagaataggaaaaccaaaagcaactccagaaacaaaatgtaaccaagtattaattactaggctgctaagagtgctgagagctaacatggagtttaggtcagagggaaagaaatgtggaacataatcttcatgatatgatctgctaagaaactaaacttaggtgatatgtggaactgacattatccattgactataggcagttctacactgtctatttaaattaaatcttgatgctatgtacctctgtgtgttgctatgtaaatatgtgagtgtatgctttctttttcaatgttgtaggttgaacataggcttttgtgtgctttaagcaagttaccttttctattagtgagcccaaccttggtttttggagacagaatcttatgcctattaatctttatgcttcagcttcctaagtgctgggatttcagatgtatgcctacacacgctgctaatttttatattagaacctcttgtacaaagttaatcttcttccatagtgttactaaactgtaagctcccaagtcactattgtgtttaaatgttcaatttaagttcctgggacgttcatggtttccagtatagtacctcactatatataagaatgaaatagagaattggccctcaaagaaacagaaacattttcagacgtgatttgcacatttatgtctttcattttctagtcctttcagtaatacaagccctagcttgttctcatcaacaaatggtcttcatacttttttaaagttatttttaaatgtgtatgtgcacacatgtgcccgtatgccatataaggcgtagtccatgtatggaggccagagaacaacttcatgtaggctgttctcctttctttacatgggttccaggtaccaaacccaggtcaatattctctcacagcaagtcttcttatcccctgggccagctttaatattttaatttacaaagactatgtgactgaataatgatatttttttctactgttataaaagtttgatactcaggcttttattgttttgaaaaaaaaaagttcaaattcccatggaagttttcttcattcatttttgtattggcagagcttttcatcctgaggcactatttcccctgtgattgtgaagtattctgtgatgacaaggatctgactttagtaaagacactaccacctttgtttagtagttaggagttatttagtagtttcttaggaagcagtttggttattatttaacagtgttaatacatttgaccctttaaaatggttaggaaccttatgttatatgtgtgcttaatgtatgggatcattcgagttcccatttgcctttcttgattaatctgtttctattgttctatctaaaaaccacagtagcaacttataattacaggccaagtaagaaacatagtctgtaaaggcgtagggaaaccttaacccctgtgagccattgtttgcttttatcacagcctttcacctgagtggcatttttctagccatttgtgagttaagttctgaacctactcagcacagttttgatagacataactattttttcttttcacatttctattttcttaatttgtttcctgtagttttgtaatcatacaattagtgcagtgagtgtgaaagtgcagttagtgcaaagcagattttggagctaataaaacgtgcttctgtgcttgagctgggggtacaaaatgagagaacaacttccaagccaagagtatggtggagcatgctgtgaggatcacttgttgttgtccatgagaatagaagagcatccatggatcggcgggttcatttatgtagtgtttttctttttcctggtcttcctgccttcggtgctttttcataaactggaatcctgtgatgttttttgcttaatattttaataggctgaatgtgttcctaaaaaatcatatgttgaagacatatgtgtgtgatgtttttttaagtggaggccttcaggaaaggagctgatcatgagctgcctgtggtccttataacacaggcctcaggaggaagcttcctcgttccttacccgtcagaaaacagtcatcagggaacctggaaactgccctctagctagcagatctccagtatccagaacttgagcttcccaccttccagaactgtgaggaataaatgtttgctgttgggactcagccagaagaagttgaggcagttagggaacaagcatcatctatgaatataaatttgaaaaacttcccaaggtatagatatagtgctcctttctcacttactatgtggcatttaacttatttatagcaatttaatattggctatttaaagttttatctgtcttgattacttcctaataatttctaataattatattactcagttcaaattaaggaggctttttttaaggttctctaatatgtatgtatgaaattattcattatcttctctgtaggttttgggtttgtaacatatgcagtgagttctgcctgataacacaattaacagagatacagtgctgtctcttctgactcctgggactcatgggtcctgctcagtctcttctgtgccgtatgattggtctaacttgagcatgcagcagtttctccaagcttcccttcccatcgttgcctgccttgtgtttgcctctcttatgaagtatcacaagcagtctttgtctaccagtttttgctttcgcaaatacttttaaagaaattgaacagccctgaacagacgcattggcacaatttcatggagcttttattctctgttgttatatatattgtgctatgtttttcttgtgttaccaactagattggaagttaattgttacgcctatcaacaggtacactttttacataaaccaaaaaggagataaccagagattatgaaaatcattaccaagaattagaagtttttaaaaagttttttaaaaggctcaccatctagtaatcctatggtatttctaatcttttattcaataaatatttatatgtgatgtgcagtatgccaaggactgggggtccaaaaggaacatcatgggttaggtttttcatgaatagatgttatatcgaataaaactgtcctttactttggccttgctgatctcaatgtgctacatagctataatagtatatattagtcatatttaggccagatatgacgctaagtcttacctgtaataagttcatacagccagggatacagacttccttcttttcattttacagttgaggcatctgaggctcaggtaatgaatttacacaggacttaacactttacaccgtaactctccattctttgtgatttctccagctgtaattttgtgacttctgactccaagtccagtatttccctttgctttctctctgtagctttatgtctctctgtgctgtgatcagaggtggctctcctctcttaagggaactatccgacctgtggtcagctctattagaaaggtttttatgataagcttaaaaaacaaaacaaaaaccaaaagccctctttctaaaatttttctacttttacctaaataattttaagtcacatacccctttaaggtgtttaaactgtcaacccacattcccactcctgagatctttgcttataaatatattgcattattttagatatctttagaatatttactgtctctgtcactattggtaaacaaattttaggttgcttgtaggctttggtttcagttttggttttttttttttttgttgcttatttttgtttgtttgtttgtttgttttactatggccacagaaagggttgtacttcctcaagattaaaaagataaaaagagcttggggtgactgctcagccattaaaggtgctttcccacaaggaccagtgttcagattccagaatccacataaatgcaggccatggcaccttactgcatttatcaccttagaaaatgaagattagaggtcctcagagcaagctggctagccagactagctgaaaattagtgagctccagatagcaagtaacaattggttatatacaaagaggttgaccaagtaattaaaatatattacagattgatggtatctgactttgaagaagaaaattataaatacagaagaaaggaaactagaaagaatcttacagtgttgcatggagatattagtttgaattcatcgttcaaaatactagtaggaagtacatagctataactagggcatgtggggatgtgtatatatccctgtgtcacccacggtctgctcacagagtctgaaagccacagaaccctggtaccattccttctgtctagattttggcatctgtataccattctctatctaaaggagccagtacccctcagaaatggctgtgtctagggccatggcagaagagtgaaagtgagtgaggagcatcctttttttgtgaggaaaggatgtgctcaaagagtgatgacagcttcttaggcctgggaagccactgacctgatgcactttgtgaggcaaaatactgaacagtagctatagatttataagcccttctataaaatagctaagttgtgttgatattaattcaaaagcattatgaaaaatagaattcttactttccaatgaaatacttacaagttagttacacaaggtagttttgcagttggtcagcactggcagatactgtcttgatgtactgacagttgataattcagattcacttcctgacagaataaatgcagcaagtcacatcacctgagatacacctccaaatctgcatagcctgagctactctggaggaaagctctggcaaatggagagctgctttggcctgtgacagcaaggtcacagcagttaggacatgtaagagagcctaagatggtacaggctgtttcctaaaaagttattacaagaccactcgagcaatatctgagttaaacagtaaatatagaaaggttaattagatcgttttggtctgttgtacagcacacatgttcacgtacacactaaagatgtttgaagacagtagaatgatgttcacaactgacttttaaaatggtacagaaagaaaagtttctgtccttgtaactttttttttgttaagtgtaggactttacaaaattaaaacagtaaccaaaaagattgtttaaaacctaaatgggaaaatctctgaatgagtttttaagattgatgttgagagctggagaaataaagagcttgcctagaaggtctgaaagaaggtcccaaggactcatagaaaatcttggtgtggtggtgttggaggccaccttagcacttgtgtgtagggtaggggtaggaatcggaaaatctttgggactcactggccagccagtatgactaaattggttactttcagatttcactgtgtgcccttacctaaaaaactaaaatgtaaggtgataaaggaagacacctgccatcaactctggcttctatacacatgtatgcgtgcgcgcacacacacacacacacacacacacactcacacacatacacacacatcatcaccatcatcatcatcatcaccatcaccaccaccaaatataagtaacaaataaatttagtaaaagcaatcttgtgttcatgaataaggaacaaaaccgtcttcacctatattagattctcctgctagagtattataaatagcccggctaaggacagaataactagagaaacaaaagtttcctaatgtgtagcagactagcttgtaggcatccagagatcagaaacggaaagggatggctggagctgccttgctataaggaagaacagacgcttaaggaagcagaggactttatctgggtgtggtgcctgagtcctatttgcaagaagagattagggttttcatatggagtgtttgtttgtttgtttgtttgtttgtttgtttgagaaattctgcttttaaacagataaatgatttcaagaattcatactttaaacataaaatgattgtttcagagtcgcccccctccccccagctggccctaaaccctgaattccttccacagcttcataaatgctaggattacaggtgtgcatccttccccagtacaaagtaatccttatgcttcagtgaccgactttgatgctgtgctgcaatgcttgtaacttaaaaatgatgtattaattatgggtacctcttacatttatattctccatttagtatgaatttgttttccatataaataaagcacagagctttttatatagtatggtgaggataatcaataattaatgtcatgaagttacagaggaaccagtaccaaaggagagtgtagctgatggtcacaggtttcttttttgcttttttaaagctttgtcactatgtttcaatattaagtgcagtttaaataaaattaactaatatatctgtaaatttattagatgatattttccttacattatagagagctcttgttaaaaatcacatacttaatagtcactgtgtttataataaatttgtattttaagttagaataacttctaattatcaaattctcttaaatttatatgagatttaaaaaaaattttttttaaagccaaagcttaggactctaagtactacaacatttagttgaggaagaacttccaagacacaagggggcactgtctttctataatctgaatgaattttacctagctttttccttactgtaaatgttcttctttccccaaatttttcttcataatcatataagctaaaatattatttggctaaatctacaatactcaaacccattgtaagcattcctagtttacaattcaccatgccagtagcataatgctgaaccttttcatgtgtttacatgagtttgagaacggcgaatgattggcaggttggaggtggtcagcacactcggctgttgctgtgtgggtctgggtggagactgctgtagaaccattgggttgctctggggagtacagcgactatgcttgcagagcagcaggataaagactgcactgttccagctgcagctgcattttccatcaagtatcgcgttggtgctgatgactgttttgtttttattgtcatggaaacttggatctgtagaatggatattctattcatctgggaaaatagcaattccttgcataaaacatagggccttccagagcagttccttaaaatagatattccctgagtatgatccaaaaatttgaggaagtaagagtggaagaaagcagtcgtctgaccacttgttcagaattaacggataactacattaagctcattacttgccattagaaatttgaaaggcatggcatttatttagtcagtgtaattgctatctgccctctagacatttctttcagatattaagatctgttgggaattctgaacctatgtcctattaagcaattgcttaacaaacagcccttttaacttcatgctgcttatctgttataatcttccactcaaatgtctttcgtcatggaacactttttaaggagctttactcaaaatgaagaaatgctactagaaattattattcgttttgggaatgaaaagaaagaacagaattaacgatgaggtcaaaaggtccttatacatagctttatgagttgtgaatagaaaggaataaccacaagccattttctgtgtagtccaagggagctctaattgtagttagtgatttagaaaatacaaatgtttagtaaatgataataacatgcagatgaggccagtgtgagttaaaagaattctcaaacttatattgagaagagggatagttatgttatgacagcctattgaaagttattggtgaggctttctacagggtaaggctttttaacatcttaaaaaaataagagagaaatgtcagagtgccaatgttttaagtaagaaagtcagtaataacctatgacaggaagtgtcatttgaatgggacatggaagttcttcccagagaatggttgtgccaaagggctattgagccctgtaaacttcagtagagcagaggatttgaaatgtaaaaaaaaaaaaaaaaaagacacatacaaatctataaaaatgctcagatagaagggcagaggagatggctcctttgaaaaggtatttatcacacaggtgtgaggatcccagtcctagagaggtagaaacaggaagcttgctgggattcactggcctgccagtttagcaagtgtgggatctcaaagacccaatgggccacagacaacattgtgtgatgagatcacaaatatatttgtctacattggctataatacttattttttaacttattttttaagtgtaaggattttttatttgtgcatatatttatgtggagctggggtagctgtgtgaggtaattagttgtaggtgagttcaggtgtttttagagttcatgggcctcaggccccagtgtggagctaaagttagaggctgttgtgagccatccaatctgagtgctgagaactgaacttaggctctctgcaagagcattatgtgcgctattaatcactgagccatctctgcagcatcttaagtataagttttagtgtcggttttaaaactatgttttacagagcttaattgctttattgtatgtgtgtgtgtgtgtgtgtgtgtgtgtgtgtgtgtatacatatatatggagagagagagtctgatataggtaaacaattttcaaagtcaatgtaattcctatccaacagagagatgtgctttaagaatgacttctaaataatatgatttactaacatcttgtacaaatacctataacaagaatttttaaaacttgcacaactatgtgacattgaagttaactaaccaaaagctgattgcagaaaactcggaactgggcattctgtgagtgaaatgaagagagagaactggactgtctccagctttgtaacctttggtaaataactccatgctttacagaagacaatattcataaagcaagcagtttgttgctcattcacatgtgtcagctcactttagtgagatttccaatgccatgtaaagtatctctcaaattagagaccagaatctctttacaacattttaaaatagaaacattaaataaaattctagattttctaaaagttttgtttgtttgtttggttggttggttggttttggcatcaactgaattatggcaaaatgttacagaataagtagctggggtttggaaggcagacaggtgaggaggaacttggtatttgctttggtttcctgagtgctgctctatgtgcacaagtgaggcagtttaacttgagagcaaggagaaattccccacataggaatacaatgagtaattgctgaaactcaggtgaagctgaaaagattttttccatctaaagctgttgtgttggcagaagtaaattagtactgtcctggacgtactgcaacaaacttaaaggcaagcctgggaaaggactaaactaattccaaggcacttgactgttgcctggcattttttaaggaatacagcaaaatctagcaccccaagtacacattttctaagacctagcattgacttatatatcactaggacataaaatggattggggaatttgaaaaacattcatcccagaaagtatgtagatgtggaaccaacaacgaaggatattgaggtagctgttagaaatgtgttcatcagctcaggtatgtagaggagatggtgatgccaaaggagagaaactcatggaatttctgagtgagagtatattatctggaaggaaatgtggaggatgagagtgactgccaagtacttgcagcagcagcagtttttctgatccatgagagctgagttgcagatatttgacttaaacccgaaggagaaggcacatttggtggctaatgtctatctatatctcagtactcaggaggctaaggcagagttactgcaagtttgatgccagtttgagccacaaagtaaaactgtacacacacacttacacacacacacagacagacacacgcacacacactgcaggtcaacatgatacacaaactagaaaaagcaagcactaccccatcctcaatgaataaaagtaggtaaaatgacagcaagtttgcagatctccggagtgccagttaccagctaccatctttccagtgattggaaagacctatgggaatcttagcaaatgtcatcaccaaaaatacatacataaaatcaaaggctggcttcattgtttcttttgaggttttttttttccctcaagcctccgctgactctcataggagagagaagattgagcaggggtcagtttccccagacattcatttcaaaagatttgagctgctgtgggagtagcaaagtcttttgaccgtgaggcaagtgattgaggaagaactgaaacttgtctcagacctaggaaccaagtacaggtctcattcctctcagtaaaccccagtcagttcagatacaaacaggatttggcttctacaaaaggaagaaagggaaggaaaatgcccaaaggcactgttttacaagatagtgatgtttagtgcggattgtcaacttttataggatttggattcaccaggaagacaagctcccaggaatacctttgagggataattatcctctaagcatgcctgagagggagggttatgctgataagattatagaggtggaaagatctaaaattaggtggcaccattttcttggcttaggttctagattgtacaaaaaggaaaaagcaagttgagcacagcccatgtgctcctgccaccaggacttaacccctgtgatgagctgtgtcctcagactgggagccaaaagaagcccttcttttcttaaggttattttgttgttgttgtttgtttgttttgggttttttgtttgttttggtgttttgttttgtttcatcttgtcttttagacagggtctctctatgtagccttggctgtcctggaactcataaaccaggctggccacaaactctcagagctccacctgcttctgcctcccaagcactgggattaaaggtatatacttccatggctgactttttctgaagtttttgccttgtcacgtattttgccagaacagaccaagtacccaagacaaggatctataggggattgaacctgaaccaaaacagaaaagaagtactccagtaaaaacctaaaaagtacaaagaaagaacagtgcatcacttgggcagcgcaagaggatgaaatgagagcttactgcccgtatttgatgccttacataggaagagggcatgcccatgcctgtggactgggcattcttttctacacatgatatcaagtgatctacattataacagagaaaagtaaaagatgaaaggaccagttatggcatggtgactgggtatgatggctcatgtaaccccagagctttaggcatccaaacagcagaattgtacaagtttaaagccagtctggacttgtaagtagtaagttccaggccagctggggttattaagtgagaccctgtcttaaaacccaaacaaacaaaaacccaggtggtacagagacaaatctgcaaaattgccctgatcagtaatatcacattaaatttaatttacctaaatagcactcagggagaaaccaagaattggcaaggaaaggtttgttctttcgttttactatgctctctatatacattttaaaagtttcttccctaagacgagaacaaagaatcacgtacatactgctcattaaggtcaatccacctttgtaaatgatgagggtcatctgtgtgtctttttctataagctatagtcaacaatcagactatactgagcacaaagtcccatgtgccctctcctggaattgtttcccctgaacatttggtaaaagggaataaacagggttgcattcaagcctacctagcctgttgacttaaggaatatgcaactctattaaaaatgattttatactatctgttacacttcttttcagataattctaccaccttgtataattttcttggttaatatttctgctcgttacagtttctgaactaaagctacttgtggctatatatacaaatgggttctgtgtgggtggtgggtatacagacagctgttcatcagcgctaaggaatgtagaagcttttgggtgttaatgaaatttagtgaaatgaaaggcataatgattcataccacatttctggttgtggtggtatactcctttaacaccagccagcacttgggagggagagagaggcagatctctatgagtttgaggccagcctggtctacagagctagttctaagccaaccaaactgtgagaccctgtcaaaataaaacaaagcttaaaatgtctggaagtacccagcaattccctttaagttcttttcctagacttcacattctttctctcctgtaattgacttttttccttgtgacacttatcatttttttatagtcagtggattttgttgaaaagtaattcaggcttgatccagagttgccctgttgatatggtgctcacacacctaacctgcttgcacaggctgttccccagcaccatgatcatgggaagagttgggggccaggcgatcagaagtttggcagcctagtcttcaaaaaccctgtcagaaagaaaagtaattaaaacttgaataacgtttctttgcttaccactgttctaagcattttatattccagtacgttttaccattgcaaaagcacagtgaggaagctggggtgtcccccccccccccagtttacaatagctgcacctgaggaatggagacgttcccatcatacagagttgctagagttccatcatacatctgctacagagttgcagtttcaagtgctagtttacagcacgtttttttgagcattgtctgtctcatcaggttctttcttttctttcccttctacctaccttcctgtccttcagagatactacactcagattctgcagaactgcagttataggagggtgtgcaccattttccacatttatttgaatagccatttatatagcttattcttcctctttttatatttgggccaggctggcctccaatgtgggatcctcctaaacctacttgtccagtgttggaattacagacaggtactaccacactgtgtgtgtgtgtgtgtgtgtgtgtgtgtgtgtacaggtagctgtgagccacctcacatggatgcatggatatggattctagtcctctaggagatcttcaagtgctcttaactaccagtcagtctttccagccctttatcaaattcctttatttaaccatttcaattggtatgtaaactcttattttgacaaatgtcttattactcacaaatgagctttaggttttgacccattgagaaattgagtttttactcattttcagtttgcacagtttgtatgacagtaagtcctatgctctgtgaaaactgaatgtgacgtctgttatcctcagagtacttgttctgaagcagtactgctacttaatgtttagcagaccataaaaaggatttaatgttttattctgggcattccccatctgtttcaacagaatggcatggtcctcttctgatggctctgtgtctctgtgtgttttcctatggtatgcaaagtgtgctccttttctacattgtatacgtgtcagtcaggaagccaagtgagacagtgcattgccatgtagagcttttcttccaatgcagtgaagtcttggttgtttcaactatttttttaaagcaatttattagtgtgtgaacatggctggttctgcagaactgtagttataggagggtgtgcaccatcatgtaggtgctagaaactgagcccaggtcctctgcacgagcagctggtgctcttactgtgagccatctctctagccccagtggtttgccatatctagtataccatatttgcagatatcataggtaggatgtgtagaatagcatgcttttggtgctctgcttacatgctccattttcatcactgcttatcatacaagttcctgcatttcttaacaagttgtcctcaccttttactgaatgcagtatgcaaatttatatcacacagaaagtaagctgcctgactcatagtgttgtttgtagttatcaaactttagggccaattaaatagaatacattacagtttggacttgaggttaaactaagcaagaagaggaactgagacctaaaagaagttcagtaacttgctcatgtgacactaccagggcacagcaggcacttgaccctcaccaccctgtttatgaccagatagtaagggatggtagcagctccatggcgttctttttcttctcccattctcactgtcaggaaaccttggtaattagtaatcattcattgttctctaacttacagcataattcttttatgctgttttgctcccatgtggctatataacataaatagtcttagaatagaacctatccctggcactaaaataaacgtctagagttcaagaccattgttctctgaacaaatggcatctaccttctgattccggggtgccagagaaaccagacatccatactgacctcgcctggtaagatcatggcccaaattaaagagccaaatacagaaaatttgagaaagttattgaacaagcaatggtaacttaatattctactcattttataatacaagacatttctgaaaggatcactgataatgatttgataggaacagagtcagtctgtgagaaggaggaggaggttgtataaatgtatagttaccaagatttgttgatgccagaaggaaacaaagtgcctaaagtaacggtgtttgagaatttgctcctttgtcagcctctagtcaagtttgttgttgatgggctgttagtttacttctcttggcatttgggttgtcagcctagccttaagagcttggccatctttctaactccatatttatttatttccccgtggttatgggcaagatgctagggaactttaacttactaaatcatttgttacttgaaagccactaaataaaatcctttaagatataaatattattttattatttcaaaaaaattagacatttatgacattttctcttgaaatgtagccaaatgaccatcctaatccactattctgttggatggctataaaagtgaaactatcttttctacaaatttagtcatgtagttgaacaagtgcagaaacctgaagtgagaaagcacacgtaagttctactaaagggacagtggccgtgcaacatgagcagtggttaattgagcacagtgctttctaaaacagcttagagattgcagatagttttaacacagagagttagggcgatagctccattagagtgagggatgacagcttaaacacagtgaaacaatttagagaagtgaagcttaagttttgtggcacatataatgtgcacctttttatgttttatacacgagacattggaactgtctactcacttcccctttctgtgtgactaaaggcaaactgtcttttataaactgctgtctcatctacttggagaagagagagcatggataatagttgggttggggttgcttgcatcttggatgacttcattttggacttaaaagtcacaagaggtcatgtctaaggaactttaaaattagcccatcctcgaggtcctgtggaattcttgcctaagaagctgtttgtaatctattggctggttagagtggtaacaatacctggggcttttaaaacactgagttctgcagggattgtctctgtttatctgactgcacacttacttggcctttcctttgctgaggcctcctctgtagtagctgtgtgatgatttggtatggaatgaacaaaaggcgggcgcagagaacccagcatctgtgctgtcggcactgagtacataagcatcttcagtatagcgggcgatgtgcctagcacagatgctcatcaataatgcttaaagcaaattgttgtgaagaaataggcaaacatttatttaaaagccctctttctttttcgggggtggggggatgcaaaagcctttatttactttaagaaatattttttatttaatttttaaattagtcactttacatcctgctttactgcccccctcctagtcaccccctcccacaatccttcctccatcccccttctattctgagttttgcccccccccccccagaggtatctccccacccctggcaattccagtctctgggaggctaagtgcttcctctcccattgagccagagagggcagcccagctagaagaacacatcccaaatacaggaatacaccctcattttaaaaaagaaactgttagaataaaagcccccttttctataagattgagcaagttgctacccaaatgaggtctatgatggtagatagtgttgactttaggtctttcagacaagaatttccaagtactttgtaaatgttaattaaactgagcaggcctgtgtgaggttcgtgttactgaagtgattttcctagcagaatgaacgaaggcattaattgtacatgacttgtatcttgcctagttaacttaaaagagaggcaagagtcaagagactaatttaataatcagatttcccaagtctcggaccaggtgtgtggctctctgataggagttgaatccctagtactgcctaaagagtgttctgctttgttttgatcgtctcaggtcatgctcagttatacccagttgcattgtacagttacttgttttgtaaggcagcacctgacatttcttcagatggttaataagagtcatagtacatggaattggcaataggtttcatccataggagtagaggagcagcctgtccatccacaagtgttaggaaaacgacttttatacgtaccaaggagaaaggagtgctttgtgcagaagactgtcatcaatttagatttgtctccaaatgtttggatttgactgtcaggatttgtttctctgaaaagcaaatacaggaaaaactcacatgatttatgcattaagatactttaagtttgaatacaataatgttgatagaagtaatttttaaatacttatatatttttctatgttaatatctaggtttataccgggttttgtgtgtttgtatgtgtgtatctttgtgtgtttatgtgtgtttaagttttaactgcttgtacgacatgcaatgatttatgtagtggtgaattgaaatttgtggttgcaaattagtacaacttataaaaatgtagagaaatcataactggcttttacaatacaaacaaggaaactctctagtttatgtctgtgctcaggagttgttaatggaatagttgctatagttagtaattaattgactagaaaatttcaaggatccaggagttgtagaaatataagctgagcagcctaatattgttgttgctggctctttcctcaccagcattttttttcagctagtaagagagcagacaccatgacggtgtgatagagcagacttcttcagcccgaagatggaaatggacaggagaaaagttttctgacccatctcacagataccatcagctgcttttttgatcacctcttggtatcaggatttctataggaaaaatagtgctagcagtgatgctttgcaatggagtaaaacacctgttgtgttttgtgtcagcaagggctagctcctaccaccaagccctcagtcgccctgagatgtagagaggagagttgagaagtagcagggtgctttagaagagagcactgagaagtgagggctgtgcagccttaagggaggtggaaggtcaggttccctccctctctgtaatgtaaacttttccatgccttagataggatttaatagagctgagtggattggagaactaagtagtactgagccgatgtggaaaccatgcctttgaacttcagaccgtaagcttgaatgaatgaataaacctttcctgtctataatttagttgtctttgatagagtctaacctgtgtgaaggcaaccgtggtgcatgtcttcctgtggaccaggtgccccagcctggcctttcccttgatgatgcaatagagcactcccacctttcgattatgaaattcttttttgtttgtttgtttgtttgtttgtttgtttttgtttttcgagacagggtttctttgtatagctctggctgtcctggaactcactctgtagaccaggctgccctcgaactcagaaatccaccttcctctgcctcctgagtgctggtattaaaggcgtgcaccaccacgcccggccgattatgagattcttaatgccaacttgtagaaaatgctacagtccgttggagttaaaaagtcccattaatactactgcctttgttggatatagcttatagtcttatacatgacttttctttcttttttttcttttttaacactcacaagttaaatagagccttaacctacatgcagaaaatggtaatcattttcactttcaatgttccaatgtggttgtaagctgctctgtaaggaggcaggtactgtagggaagaggttccaggttgagggaggggtacaaatgaggtatgagagtgacctgaaaggacacaggggcacatggagctgcagacttccaccagaagactgtaggacaagacaagggtgctctgactaagctggtggaagcttattagggccaattataacgacagaaatgacaaggtccgccaccactggggaagcaacgtcctggggccagcggaaaaaggtatagaactcaccactgaattgaattaaatgtacactcttaagttttctgtacataaatataattaagaaatttaaaaagaaaagactctcataatcccattagttcataattgtttggaggagttcatctaacacatttccaaggcaaagtatggtctccaggttcttacgttcaggtacttcttgctcatacagtggctctgtgttgggatgctgaggagttgctgagctgccctggcaagtagaagctgccatcggcaaggccttgaaggatctgccacccaatttggcctctgcttctggatcttccaggagctaagacactgattgctgccgtacacgtgaaccagtactgacagagcaggccccggctccattgccttacttgctgtatacatccccagaggcttcctccctgaagttgtttgaatcaggaatttgtcatagcaacaagactatgtatgtaactacagtacaaactcaggctctctgtccagagtatttgcaatagagctgtgccacactactaccagtgattcacctgcctctacctcctaagaactgggattagagcacacaactactacaaccagctctgaacttataagtccttgggaaataactagtttcacatgatgaaaggtaaaaggaaaacatacttctatttcaaaatcttttaaataaatactatttttaaagcaagtgatctgttttctgtatcaagacttgtaatgtgtaatactttcatctcttaagtctcattccctctgacttgaatatagctatgaaaggaaaatagttgaggaatatttatagacaaaaggtctaaaattaaatttttgaatatttatttattattattatggggatggatacacacatcacgattgtacgtgtggaggtcagaggacaacttagtgaacttggttccctctatccctctgacatgagttctgcgcttcaaacccttacctgccaaaccatcttactgggcccaattctacatttttctagattatctcaatcattaagattttaaaggacttcattgatactcaggctgatattcatatgtcttttgttccgtttttctaccttaacttgttttaagttcttactagtatatttgaaactgagtacgatacattttaggtaattggttagctttgaagtctttcagagcgtgtttttaattgataaataattgtatttatgacttgcaatgtatttgtgttgttaatgattatatcagctatgtctactgattactaatgtttgagggtaggaatttctcagataggaaggacttagtgtttcagccatgaagttgatactgtacttacttgttaagtggctgtctaaacagatgtgttgccttcatagtattgacataatctcccagctctttcttgccaagtatatgagggaagagatgtttccagtgaaaaccatcttttaaaattaaggataggaactatgaaagatttttaatatctcataaactaatatcatcccccaaaataacgtgtatatgcaggtgtgaactaccctaaatttttttccccaccgaacttttttttaaagatttatttattatatgtaagtaactgtagctgtcttcagatgcaccagaagaggacatcagatctcattacagatggttgtgagccaccatgtggttgttggaatttgaactcaggatcttcagaagagcagttggtgctcttaaccactgagccatctcgccagtgcccccacagaactttttaagtcattttgagttagcatttcctttctgtgtctgtgatcctcttgcttcagaaaaggtttctagtccattaacttcatatgcatatttttcaaattaaaattctttatgtttaaaaattatgataagaatggagctatagctaggtgtgttggtgcccacctctaatcccagcaagattagtcagtcttgctaatctcagttagtcttgcagtctaatttcaggtggcagaggcaggcagatctctgagtaagctactggacagctagtcgattacatgggtacgacattcccactctacccacacacacttctcctactagaaagaatgaaaatgtgagtcatgtatgcctatagtcaaagcaagattgcaagactgaaccaggaggattgccatgatcttaaagccagcctgagctctgtaacaaaacttggtctcaaaaactaagtttgtttgtttgattgattgattgattgattgattgattgttttttttttgtaggtggtagtattccactgtaagccttattatattctttctctcttttttttttttgattgattgttttaaagaggaaataagaacgatggagaagatgtacagtgttccaatggctaagaggctcagaaataatatccttggcactttggtaatagctaaagtgccacagacttttgtgtgtctgcagtgtcattagatggtaggtttagacttatccaactgtgattacttgtacatctgacccgtgtttaaacttttaaatttagcagattatccattttacattttattcagccacatgatgacaaactcagtgacatgtaattatagtaaagttcacataatctttaaattatttgggtaaattcttatcaaggtaaagtcacatggtgacattttaccttgaaatggagaaaaacatcttggcatttttttttttttttgctccatttttgacatcttcatcaacttgtattatctttgctgaagtcataagcagtatgttattgtgatgaagtatttagttatttttccaaatttatttactgaatatacataaattattaaaaataaatgagtaggtactggagagatggaccagagattaagatcactggctggtcttccagaggatcaagtgtgatacccagcaaccacatggaatctcagaactgtcctgtgaatccaatgccctcttctggcctctgtgaacaccagttattaatgtagtacataggcatacatataggcaaaatattcatacacagaaaataaaaataaatagatgttttaaagaaaaaaggtggaatgaatgctctattaaaaattcgtacagtggctggggagatggcttagtggttaagatgtctggatgttctatctcaggacccacataaaagctgggcgtggctataatcctagtcggggctgtagtaggaggcagaaagatctcagggtcttatcggccagccagcctgtctaaatcagaaagatccatgttcagtgacagactcagaaaagtaagctggagagcaaaagatatctaacattgacatttgcacactcccaaagttcacacatacacaggtgcacacacatatataccataagcacaagcacatgtacacacaagcacttgtacacacttatgtgatgtgtacatattagacttaaaacttgctgttgtcagttgtgggcgctgtgagatgctcattgtcctctaaggaaccgccagggctgctcctgtgctagcctggctgactttggaactgtgtgtcctaaaagaaattatgaaggagaggcatactgtcagaaaatgcagcaaggagtaaggaatacctgtgaaactgagtgtgaccagtagccatccatttctgccttgtatacaacctggaagaagctacacattatgacatgtaagaatgtttattcataacccacaaaattggaaaaatttcagcagggaagtagataaactatgcttttatgtttataaagagacagcaataaaaattcactgaactaatatcatcagtttatctcaagaatataacattatatgaaaatgcagatttcaaagagtatatatcatataaccccatctttttcaatgttatgtgtattgagtgcatgaacatgcatttatttgcaaactattcaggaagattcacagacaacacttttataatagacctcatgcttcagtgttcagtcgtctctgtctctgctgttctcatttctgagagaaataaaaacatccattttgaagtaaatatgtgtgaatgtcctctgtgagttatattgttcactatttaggtgtcaattctttattcttttggcagtattttcagtgatgacacatttatgatcaagtatttactgagaatagaatgaataggttttaagctgaattgtctatcaatgaaatttttatacaaagttgttttcttggttttatagggaaaacatcagagagaggctcattttccctgtacagcagagactctggactctcaggctgtcaggtaagtttagtgaagtttacacttacataatgatagagaagatagaagtttatctacatgatttcaccattatgtattcatattattttgtgacttcgtgtgattgggttgttttgtttttagcagctcaacatatcttttcattgttccatcttgagatggtttcctttcttcaattgaattttcttaacttccatttaatgggagacaaagtagaaaagtttctctgctttctaaatgcatcttatgtctggaaataagttctcacctattcctatagaaaagcaaattgttgatacatgcagtgaagagcatgtgataaacacatgtagcttgaatttgttgtactgatggctgtgctattgccatgagaagtgctttcattttatcatagagctcaccaaatatttcagacctcagctggctttgtactggggactttctaatacccttacaaggttttcacatactgtatttttgctaatggtcatctttttcactgttttctcatggaattctgaatttagccccgcccttcaaatttaaaaaaaaaaaaaaaaccaacaggaaggcagcctttatggggacttggtctattctaagccatgtgtatcttgagtctcttaagtatcatacaaataataacattctggttaataatattcataattattagcaaatgcaactaacagtgatagtcacaatacgtgatttgttaaatgcaacaggtgccccatcagttagacattgtggcctcacacctataatcccagaatctgagagactgagaggcatgaagattgtagcctatgctggcctcaaactcagcaattcataagtaagaccatatctttggatttcttcattgtctctttctttgtccccatttctttttttctttttctttttcttttttccttctcgctctggctctgctcactccagccctgcttgctccaaccccactcactttagcccaaggattgatttgtttgattgattgattgattatatgagtacactatagctgtcttcagatgcaccagaagagggcctcagctctcattacagatggttgtgagccaccatgtggttgttgagatttgaactcatgacctctggaagagcagtcagtactcttaactgctgagccatctctccagccccttcatatctttgaaacaaataaataaaaatcccttatctctggtttcaattacccacattcaactttgttttgaaaatatgaaatgaaaaatttcagaatcaaactattggtcagttttagatttcataacattctgagtcatgtgatgaaccatctagaatgtgagtcactcctttgtataatgcatttgtttacactgtacatttcctccccattagtcacttagtgttggttctcaaattgactattatggtatcatagtgctgtgttcaagaaacccttcatttagccaataatgccccagtatgtaagagtattaaagctgccacttgggatataccaaaaagaaaaaagaaaaaaaataaacaaaataaacttaaaatgctttctttgagagaaaagattaaaagtccccaacttgagaaagaaggaaacttaattctgacatccctaagatctgcagtgttttaaaatgctcacagtgaatcttttcagcaattcatcatgcaaactagaaagcaggtgttggtcagggatagttttcagtttatatacaagtagtaaacctaagctgatgtttgaagtttttaactatggtgtggctgcttcagtaaaagcctctcacattcttagtttatgctccaatgttcttcagttttaatgactttgattgaagagagaactaagagcttacttatttatcatgcaccctaggagcctagaatttacatgagtattaaccggaactgtttgacagctgttcacaaacatagagatcaagcagttccatgcaaagataacagcgaacttacagaaggaataacaacaaaacacaagacttaagacacacatgtgagaatgataggtttctaaaaagttggcagcacaagctatccatgatcctagagaggaactccatagcatagcaaagcagtgaaaaggtggtgttacagccaggacagacagcatcagtgaagacaaaagggttcttgaagccagtcaaagggattcattgctgtgaaaagaacaatggttctgctatttattactgtttcctagctcttgctgtgctgcagctgttagagaaattatggtggataacaccaactgatttgagttctgagcataaacttggcaaactcaaattataaaaattaagatgatgttgggcatggtgcttcctgtacttttggcactccagagactgaagcagaaaaggcaccaagttctgagaatctctgaccctttcttataataacccttatcttataagagtctgtcttataataaaattcattatggtgatgatgaacaaagagaaatcatattaactctcattcaaagtaaaacttatgtataaataatgtgtgctttaatggataagaagtaaaaactatgcttaaccaattgctactttgtcataaatattcacaagtgacaaaaaacaaaggaagataaatagtgactacaaacttctatccaaatgccacctttactatttttcttcaacagcataccccaaggaacattggctctgctgttaatgtatataaaatgttgctgacattctgcaagatttgggctaatttaataatgcctgatggactttatttcatgtaaagatgatgtaataatacattagtaaatgagtcttctcttattaccttcaatcacagaactgatgggccattaaatggaaaggggtatagtagttttactggaagtacggatagatcattatgcaattgaatttttaattgatccagcacagaggctaattggaccatttttattaaattaatgacaggcattaccttttaaactgcctagcaatgtgagaattctttgtcattatgatagtttttatctgatacttcttatacaaatatttgaacagcttaaattaaaatttcagaaccttaaaatatagcagtgttagtttttacatcccagaagttggaggctttatctaagttcattatcaatcctttaggaacaagcagtttaaaattcagttagctgtttatatataggcattgaattcaaacgtgatgagagtacgaatatttggaaaatgtgacaaatgtatgtacacctattgaaaacttaaaaataagtaaagcaaaaaatgtataaagttagaaatcaatttgtgtaaatgaagatgtgaagatcttaagtgctcagccattaagagtactgtttgttcttccagagatctctggtttatagcagcccatacacaacacattctctggtctctgcgcactcgagtggcacacaggcatatgtgcaggcaaaacaccaaatagatgtaaaataaacatttcaaaaaataaacaagatttggagatctttttgtcagcaatggacaagataatggtacaaaatcttagtaatagaactaaattaactcaacaacttgtccttattggtatttacagaactctctatctaacagttgagaatgtaagtttcttttatgttagtcagtagttatgaatcatataccagctcataaaatcagtgccaatgaagtgcaaagtttgaaaatgcacagcaggtgttctctgaccatgtgatggtagaaggcaacaaaaaaatcattaaaccataaatgttcagcaaccatactaaatcccatacagtggaaaagagaaagatagcttgaaaggttgttttctgacctccccattcactcacatgccaactatatataggcacaaaaccacataataatagcagagtaattctaaaactcatgaaacatcaaggtataagtttaacagaatgtaagactttaatagtgaaaatatgcaacacaacacaactggaagaaataaaaaatctgaacagagatagcatgctcatgaatatgaagagtattattgacattttatttcttcctaaattgggctataaatttaatatgaatccaatcagagttccaacaaactttatagatactgacaagaatatttaaaagtttgttttcaaagatagaagatagcagtgagatgattcagcaggtaatatattagctgcacagcctgacaacctgagtttagtccctggaatccacaaagttgacagaaatgacttcctacaagttgttctttgacctctatatatgctcacatgttcctgtgtgcacacacaacaaataaattaattagctaattttaaaattaaagacaaaagattcagaaaccaaaatgggctggagagatggctcaagtggttcagagcactggctgctcttccagtggtcctgagttcaattcacagcaaccacatggtggctcacaaccatctacaacaggatctgatgccctctggcatgcaagcgtacctgtagatagagcactagtacattagataaataaatattttaaaagaggatgaagaaaaggaggaggagaagcaccagctgctaccgctgcaaaaacagtggtggtgcacacatttaattccagcacttgggagacagagacaggcaaacctctgagtttaagggcagcgccttatacagagggagttccaggacagccagggctacagagaaattctgtcttaaaaaacaagaacaacaacaacaggaaagaaacagaaacaattagcaaagaaggatggacttaccagctttcactgtttccttcaaagctatactaataatagaagaacagtgtagtatttgtatgtagatggacacatagctcaaggaacaaagcagaaagctgatgaagggctcctggatagatgatgttgatatgagtaattcaatctcttcagtgtaaggtactgaagtaactgtatattgatgtgggaaagagaaacttttatttcttacactatataaaacttgtttgaagtagaacgtgaatttgaaagctaaaataattaatacttttgagaaattgtacgtgaatgttatcatcatccatcaacaaataattattactttaccaaaaaaaaaaaagacatttttatttgtgtgtgtgtgcacgcgtgcatggttttctaaacgtgtgccacatatctgcagtgcccatggggccagatttctcctagagctggagtttgaggtgattgtaagctacctgatgtgtccactgggaattaactgggccctctgtatgaacagaaagcactcttaattactgagccatctcttccagccccccacagaaattcttacaaaaagaggcagaaatatgagacatgaaagaaaactgatgaattgaatttaaccaaaatcccatttcccccaaaaaggacaccatctttagagactcctgtggttttaagccaagttctgaatgcagtggtattagcacattagtggtagtaaccgctttctatgcttgtactctgggataatttcaaaaccgggatcatttttacttggaacagattgcaaagcatgaattatttcagtaacctaagtaattgttttaagttttaggtagatttttatttgaggtcattctcttataaacttgaaatttcaataaatttttaaaaaattttaagatgatttttcttttattaaatgctttatcttttttcttattcttttattgaatggaaaatgtcaaagaaaagggtcagtgtataagattgtttagaacataaagacatgaattaagtattttcttgttttactttctaagttaagaattaattcaagcaacagatcagaagatctgccatccacaggctggcagaaaagctatgtacatggagagaaaattaaaattattgaataaagaatagtaatctctagttataagttaacactcgaaaagttaatgtgattttgatataagcaaaagtttttaaaggatgtataaaattccaaggccatacaaaatgagttaaatttgacatagtaaaggggaggcatgctgggaccaacaacagcatcttttcctgcttccttccttcctcataacctagccaaagaataaagattgtgagggtccttgctgatttgtgtttctgctgacttatttacatcataacaaatagaaggtgtcaataatctgttaagcatgaaagtactgtaatatgtgttttagcaataacagtgtttttgtttggcctgtgtagaatatttacttaatagtgtgagatggctgtattacaaggaaagagctggcataactacccagggagttttagcataaatggaggcatgaaaaaaaagggagggcaggtttcttagcaatgtgggactctgatatggatgtttggaagattgaccagagtcatggaaactgtattggaaatatcattgctccattccatatgaaaagaacaatgaaatggaagatattgttaaaatattttgaatgtataacactgttattaattaataatttaaaattataagcaaatagctttttaaagaaaagtttaagttacgcacaatataaatccagtacttgctagtctgaggcaggatgatcaacatttaaagatacctgatgactcagtgattctggcaagtcaaattatatcatggaactatgtgtcaaaaaaaaaaaatcaagcaatatcatggagagatggctcagcacttaagaatatatactacccttgcagaagacccagggttagtttcagtgctgacattagatagcttacagccattttaacttggttcaggggatccagtgctctcttctggctacttagacacccaaacaaaacaaactagtacatatacacagacacaggtatacacatataattaaaaataaaataaaggcattctttaaaaaaatcaaatgttaagatgatgttacaggggctggtgagatggctcagcgggtaagagcactgactgctcttctgttgtaatgagatctgacaccctcttctggcacgtctgaagacagctacagtgtactttgtataataataaataaatcttgaggccagagcaagcagggactgagcgagcagagttgactagaacgagtggggctgagtggggcaagcagaggtcctaaaaattcagttcccaacaaccacatgaaggctcacaaccagctacagtgtgctcacatacataaaataaataaatctttttaaaaaatgttacatacatacatacataaatctttttttaaaaagttacagaactaattcaaatgagaatctaaacagtgatgttcatagagcaaaaataaggaacttaatatacaggctagcatttttttttaaactgggtgtatagaaagtagatgtgttgaagatggtggtacaggcccttcatccatctgctagacagattatgacagttattttgctttactactagtaatgtataacttgtggaattgtaaaattgtgaaatcactacgagaatgagaacagatagcttgcacacatgctatagactaagcagactaagcaggctgccagccaagtccacctactttctaattggaaagcagcaatttctgttcattacagattggtatcatctttctgcttcagtgtcagaaattgtctagcagtagcacaaggttggacttaactagatttgtacactttttctatctagtttctttacagaacatgctctgctcttgataatagttttccatcaaaatattaaatatttaatattttaatgaaatattaaatatttttcctgagaaggcatatgtttctgataattgttataatcagagcctgtcacttatgaccagtgttatacttctaacctgttctttttccatgagaattaaaggttttaaaggacagcaaacctgtgattctcaggcatttgaaacttggttcccagttggtggaggtgtggtctttctggagaaagtctgttacatgggtctggctttcagagttgcagcactgaagccattctcagtttgctgtctctgcttcattcttgtgtttcaagatgtgagcacttcatttctgctccagtcaccgtaccttgttacttactgccatccttccccaccataaacgactattctccctgtggaaccatacactaaagaaacctttccttctataaggagcaatcacagcagtacaaaagtaactgatacaaaatgtactataggtgccttgccctttctctgagttattgcaatattagaacaagaaagttgatgctatataattttctggaccaaatatatttcaaaacagttataagttaatcagaaattattcaatgaagatattacaactaataatgtaaattgcagcttcatcatatggagaagttaaagaatttaggatttttaatattaagaggcaataggagggatttggggaaagactcagtcaataaagtacttgtcacacaagtattaaaacttgaatttagatctccaggacccaattaaataatgagatatggcaaaatatatgtataaccatgtcagggccaaggagatcatcaacagacgcctggggttcatttaccaagctaattgattcctagccaatacataacctccaaggctcatgaaaagtctttgaatcaaaaaataagtttgaaaactatagaagacaactgacatttgtagaagacacataacacatatatacatacctgcatgcacacttgtatacccctatacaatgtgtgcatacacctcgtatacacacacacacaaagtaagatccttgattctaatccccacttcgtctaaggactcttttgccattgcggaagtcaaggatttttctgctcacagccagggaaaaagaaggccaaatctgataagagaagaacaaagagttcagtcctcacaacccacacagtaaaagaaaaaaactgacttcagcaagttttacacacacacataccaaaataaattaagtgaacaaataaataagcaaataagttattaatggtaaaaaataatgttttttaaaaaatcacaatcaattcttgatccctgtagtgacaagcaaaaggctttctgattgttagtggtgatccttctaaggcagaacaccagagattattattaatatcaaattatatatgcagttaattcttactctattcataaccagcagacttaaatacctaacttgctaaaactccttcctagaaaaagatgcaagaaacatctcttccttcttcaaaaaccaaggcataatttcacaaagttcaccctgggaaaggaataaagtttgctgggcttccttgcagagcatgggtaaggagtatttttgcaggactgtgggtaattctcctcccaatccccagcaggccacagctagaaagcctttccccaacaggggtgagagtttccccatagccacatagctgtatacactaaccctccctgaaggcacatgcagttattgggtatttcatcagcaggtagtagggagctgcagggtacttcctactccttcatgaggatcccagctgaaatcacaaagatggtggttgcttgacttggaggacagtcactcaagtcacaaaacagcaagtgattaaatttgatatagtgatcagatttgcaggtcagttggacaagttgatgtgatgatgcattgtgactttatctttttaaccttatagttattattgctactgctgcttattatccaaggaacttgaagtctcaagctatgtcatctacctaagactaaatagctgataaatgtcagagctaaggagagaaaggttgaggtgatagactttatgttctaggtttcaagaaaatgaaaccatgattaaactttggcactaggaggaaaaggtcaagatactaggtcatgaggtaaaagagcaagtgaagtaggaaggaaggtggcattggtataggcaggaggctatgtcacagagagtgttggacttcactgctcacgggctgcagtgttctcttttgaggactggatagttagattggtgattggaggattggaggctaagaaggatggggaaggcacagctatctcttagaacaaagttcagcttctgctgtgggagtgctctcttaaagtagcataaagcataaagtagttagaaaaaatgttaagatctgaaccatgtaatttaatctggatttatgagtttagagcatagtaaaacaaattctgtgggaggggaaccttaatgtatcaggtaataaacagttataattttccaccaatgagaattagatttttgcaagtttcttgtcaaggaaaatccttcacctactgttcctgttgactctaaaaattgacagttgtgctgtcgtatatagattaaggacttggaacaaacaaaaacttgtacagtaaatcttacataataagtgattattatagtctcaaagattattgtcagttttgaacacttggaaatagcaaagtaaattttttagtgacttttctcattgctgtgatcaaataccatacaagtagcaacttaaaggagaagatatatttggcgcacaattaagagtaccttccatcctgaagaggaaggcatggcagaagtatggagcaggtcatgatatccagttaggaagcagagaaggatgaatgctagtactcaggtcactttctcttttccttgtataagatagatttgtttgtttgtttactttcttgcttgcttattatgtgtacagtgttctgctgcagaagagggcaccagattacattatatagatagttatgaaccaccatgtagttgctgggagttgaactcagaacctctggaagagagcagccagtgctctgagccatctctccggcccactttctcctttttattcaatatagaatattggctcatggattgttgctccccacattcaaggtggattctcccttttcagttaattctttatagaaacaatatcatagatatccaagaatgtgtttaatggtgatttttaatccagtcaaattgacaatcaagatgtactgttacaagcaatagcttggtgttatcaactgttgaaactgggctactagaacaaggtttattgtacttcttctctgttcatgtaaatatgaaatttcccagaataataatcagagtcttgaagctgtccaggtgtggattcgttaactgcatgcctaacaccagattggattaggtgttaccctcaggaatacttagtgaaaatcggtttcacataaaagctttgaagagttttctcagaatactattgtgctcctaggaatatatcacagggctctttttaacagaaggtttctaaattcaaatattcaggaaaaagttgttacttgagaagaggtgtcttcaggagttagggagttgttccagggtctctcattctttagtatgggttggctagaaccattaaacctgctctctgagatcccagttcctgggatacagcatgggccaacacatcaaaagtaagatcactagcaaccctacttaagtatgtctttttttaaatccctgtagtagtcttttggaagtggggataccttccacaactgtttaaaaaaaagaaaaaaaactttttaaaaagttgtcatgtttgtaattacttaaatacttaatatattcagatgactatctagcttatcttcttcatgcagctttttttctaggaagtattttttgttctttctcctgcttggcaggcacttgcaacatatcccatgcccttcaagaaatttttcataattgatatgcaacttacatattttactctgataaattttcattggctggtataaaatttggggaaaagggtgaaacttttcattaagaattaactactaagataataaaatttctctttgctgcttatacttaaggaaattttttaaaatttgagctgttcacttaacatgctttagaaactcaatcacatgtaggttaagtttatttctctttaagccggaaatgggagaattgctgtgacaggataactgtcattatcttctcaaacctgtatgacatttaaaagcatagacaatgataattaaaatttccagaatttgtattgggaaaataagatttatacatgttaaagaacctggctagttgtaactagtgtattactgacccgggaggacatttgaagcagtggggtttctgttacagttttctgtgcatgctcctttcccagcccccaccctgaattaatatactgtccaaagtgttggtaatggctcgaagctgtgcaggttacacaaagcatttaatgaaatcttgtcttagacaaaacgcttgtgagggtcgtaattaacggctcgttgtctgcagttctattgattactcattcacaatgctttgttctcagatgataacccccagcatgggtgttcctgtctgatgaaattcttggacggacttcttcagtagcttgtagataattgctgacacccttgaaatttcaatgtaaatgagttagcatcaaatacaattattttatacatgtagtgtttgccagagttaaaatttattgcagtctgttttttagtcatttgtagaaaatcaacagactgatacattaaagcccatttcttgtttgccctgagtcctcattcaccctttcattgagtgtaattgaaaatgaagggcttctggtcatcctgcagtactgtcattatctctgaaacttcaactggagttacagtcaaactactgtgatctttgttctaaaagtaagagaagtacacgtaaaagagaaattgttacaacattttacaaatttttctctgagcatagttttgtgtcttgatcatccaatgacagtgggaaaggctgcaatggaatgccaggaacggagctgctgccctgatggtgctgtctcttctctgctgaggtgaagcgtgctccctccttgagaaggcagcccttctgaacagcagcttatctttatgtagggatactgtataccattttatgaatgtaaaggaagcatgagattagaccctgcctaggcagcagaaatattttgagatatgtgactctagtattctcaatcttatcttcatagaatacagattaatgataaagactcagtacttccagtttttaataataagttattgcttttttattttttaaaagatggggtcttactctgcagacaaggctggcctcagacttgctatagtcctctcatctcagcctcctaagagccaggatcacaggtgtgagtcaccactcccagcctggtgcttagagtttctgacatagggctaattaagcccttatttaatttgaaactagcaatagatatgagtatatttagtaagtatttaaaccaatccatttagtagtttaaaaaaagtagtctaaaaaagcaaggatacatttaccgtctgcatatattttctcttataaaggtaatgaatacttatactattgctgtgtgatctgaatccttttagctactgttttgtgtgttctttttctctcctataaaatcacatttacagtcttttccagtctaaccgattggagttaaccttaaaaaattatatttgtcgccgggcgatggtggctcacacctttaatcccagcacttgggaggcagaggcaggatttcgaagttcgaggccagcctggtgtacaaagtgagctccaggacagccagggctacacagagaaaccctgtctcaaaaaaccaaaaaaaaaaaaaaaaaaaaaaaaaaaaaaccaaaacaacaacaacaacaacaaaaaaagatatttgtcaagtccactattttattactttacttaacttttatggcacatttaaactatagagtttcttaagttcacatttcaaagccagcataactctcgcagagagagagagagagagagagagagagagagagagagaccttaaagatgtgtctcacatggattactaaaattccttatgaagaagtaagtcttttcactaactgatttatcatatataatttgaaatgttacatcccggaggttttctatataacttagcagctcaaaggataacttttccattgagtattactcattgttcaatacatcttttacagatgaggttctagaagactatgaaaatggtttttcctagtgatgtaataagaaacgagtgctatctcatttcagagtattaactctgcccctgtaagaaagacagcttgactgaacaaaactgggttgcctgattatcctctgggacattagtattctttctgcttaagatacctctaggccaagatcagtggtaatcaatagtgcggctcatttattttaaagcaggaagaaaagtcaataatatgagctgggatctaattttattttaggagaataaaagtaaaatagctcacttttgctttggtgttagctacacaattaaggtaacaagggaaaactatatgattttattggtagacttatcaagatataaggcttttataattttgctctcttttttagtcttatttcccattgatttattgggcatggctttatttattgtcaagtcctttcagatgatattgtgtcataaacttgttatttctttctttcagtgtagaatgggtctgtgtagtcagcaggctaagttagcaatctgaagagcagtgtgtttctttgtcttcccttgtacatcatagcagagtgtacacactgaggaaacaggtattatatgattcagccagctgagaggaaacacagcctctgttgttatcggcatcagtaatcatggtgaaacaagaagataggacatttcctgtccaggtttgtctatagtgaaggaaaagtcttaccaacactagttagtagcaaggaatatttgtccctgtaagaagtttgtcctgtctttcaacatatagtctgtgtacatttgcagtctcctagtttgtcctccatagataattcagctttaggatttagtccacagagtcatttaggaattacttagatttgttttcaagttaatctctttgtatatgtcagtgagagtccttcatgttgggaatcttgtacaaaggaagaggcgttctcacctgacctacataagatgctggaaaatttaatgagatgtacattggaaatgctcctagtgagtctttggtggtgtttattatcttctcaaggctttaattttgaaaaagtagagacacaaacaaaaggtagataagcgtacactgcgtgttacatatttgtcaagattcattggtaaacgtttcacttttcattgtgtgcacactgtgcatgtactcctgctgaatactaggagaacatgtgatgtgttttctattcttgatttgagctaatatatcttgagtctgtcatatcctttagattcagactctttcattgtcacctctccctccaggggtttgctactcttgtctcttctctcttcatctagtcttactttaagccattgagaattacaacccaacaagcttgaattcagggcagacctgaccttctgaaaccattacacagaacaaaaagtattgggctgaagaaatagaaaattagagtactatgtatattacttctttttacataaagatggacacataaccacaatgatttacagaggaaagagaaaaatggaagagatgttctatgactctgcttcatacttactctgtaaagtcttgcttccttcccttcgtgcctgagagctgttggtgatggagagaagaggaactatttattcaagtagaacatttgcccagtatcccaatcagaattcgagtctagcgtggctagtccacttttactttttccaagatattagtatatttatttggcctccttttacaaacatgaagatgcactttcctcctcaccatttaggccattttgtgctttttactggaaccatcttgacatctcagaagatggccaaatttaacctatatgcaagattgtttgtttgtgatgttttattttgttatctaagcaaacatatctctctgaactcagccctttaacatgccctcagattagaggtcaaaacccatgttctgtaaagggctagagagctagactatgcttgccagcctgacgactgagtgcttccatactaagctcttcccctgtagcatggaaagggccacagctgatagagaaatcaacagcaggactgtttcattgaaagtaatttcagaaataagtacattctacttagtgacttactgacacaaagtcgttgactcttaatataaatcattattttatatacttgtaaaagtttgtatagcgtgaggccagtgaggtggttcagcaaatgaaagtccgtgctgcacagacctgggaaactcacacagaacccacatgaaggtagaaggagaaaactaactttacaaaatggttctttgacatctagacgtgcagcatggcatttgcacattcaacctcactctgtgcacacacagttatagagagagatggttcacttggctgggtttggtttgttttcagctttgggagtgtttgtttgtttgtttgtttaggttttataagaggtagttcaatagcttaagaacattgttgctcttacagaggaccaggattcacttcccagcatccacatggtatctcataatcatctataacttcagttctgggcagtctgacagcctcttctgagcttaggcggcactagggatgcagtggcacatgagtacattcaggcaaagcactcatgcgcataaagttttgttttgttttgttttttaaagatttattatcattatatctaagtgcactgtagctgtcttctggtgagaagagggtgtcagatctcattacagatggttgtgagccaccatgtggttgctgggatttgaacccaggaccttcagaagagcagatggtgctcttaactgttgagccatctctccagccccaaacataaagtttttaattaacaaaagattgtcttaaaatattgtataacaagacactataaaatatctgataagagacatttatgtctatctcatatatttattttatatgtttaatgaacagcttcctctgtctttcatgtgagaaaatactaataaaattaatcaaggtcagtgaatctgacattgagcaaagagcacacccattaaaagaaattaaggtgcatgccctgtgctttcaatcacatggagatcatatgttctatatatttctgatcttgctatttttaaaatgttgaatctgcctgtcaaaggcaaaataaaagaaaaacttcaaaacagatgtggtgattaaaatttatacataacgtctgtggagacagtgatttctaggtccctgctctcaaacagagtgtcatcagaagttccttagctaagagtttagtttgtggaggtgggggaaatagaatatatatggtgtttacatttaaattgttcgttttctctgtttgtattactgcctgtggaacttgttttaacatagagcatttcttttttaagtctggtcacccctttctctgagtctgttgaatgttgtatctgtcgaattttatataattaatgctaattaattacattaatactgtagtcttttttgttcacatgccataatatctggtaattaaacttctcccccacttccatacttcagaaagaaatacatcagctgtgtcagaaaaagaatttgccttttgaggaatctgaagagcactttgttctaaagactatttctgaaaggcagcttttggctggtttagtctttgtttcgtgtatactgcatcactgccacctgagctttaaagaagcaacacagcagacgagttagagctctgctgaggcacaacaatcaagctcatggttgcttttggcgcacagcaataccaaatgtcagaaagcacagaagcaaactcaaacaaggaccctaagtttgcagttttagaaaccagaaaagggagaaagggctggaaatgtggtttagtgctgaagagcaccagtccatcttgcagaggaccctagtttatgtcacaacactcccatggtgacttacaattacctatatgtaactcccgccaaatgtcctctgctgacctccctaggcgcaagacacacatgctgtgtacaaaccgaagacccgaacacataaaaatttaattaaaaataaactagaaagaataaaaatggaccaaactgaagggaaagaaactctaatgaatagagcacacataaacacaacagaccagaaaacaggagagaaaaccagcaacaaagtcaaaagtttgtcctttgccaagtatgtcagcatttggggggataagcggaattacagaattgagtcctgcctggtttatctaggaagttctaaaccaatgtggattacatacagtttaaaagctggctcctagagaagaccaataaaattgaaaaacttattcctagattggctaaataataacttgaatcagaagtggaaaagtcacatcactcctgacttcatgaaaagaaaagaaaaagaaagaaatgccacaagcagttgtcaacttatattctaaatgaaacgaacagattcctagaaatatatactgtcaagactggctcagaattaaacagaggaaaacaagaaccctgatagaagtcttttgagttaagaaaggctcggagccagatgccttttccagtaaagtggagtgaggcccctgcttatgaagcttcctcacctccatggggcagcgttatactgataccaaagccacagacccaggaaggaaaatgagctggcacactattatccattttgaatatcaatacaaaaaaatgacctataaaatgctagctcactgaagacagcagtataaggattaaacattatgaccaagaaagtttgtcccagaaatacgaaaatggcttaacataggaaaattgatcaatgtagcttactttaccacagtaataatgtgaaggaaaagcagaaaacaaaaaaccccacaaactcactaaactgattcaaggtagttggggggcatttaacaaaaatctactacttctgccagatgtggggcacagacctttaatcctagcccttgcaaaacagaggcaggcagcttggtttatatagcaagtttcaaacaagctggggctccattttgagaccctgtcactcgcccgttcccaaaaaagaaaaacacaagctagtaccctttcctgataagaacatttaagaaggtttatggggctagaaaaatggctgggtgattgaaagcattcacttttcttccacaggacctgagttcagtttccagaattcatgccaactatttcacaagtgcttataactctgtcttcagggggtatgatccttccacagacacatgtgcatttgtgagcttacacactcatatacacataaataaaaataaatcttaaaaaaaaacaaaacaagttggggctggtgagatggctcagcaggtaagagcactgactactcttccaaatgtcttgagttcaaatcccagcaacaacatggtgactcacaaccacctataatgagatctgacgccctcgtctggtgagtctgaagacagctacagtgtacctatttataataataaataaatcttttttgggggtgggggagacggagcgagcagaagtcctaaaaatacaattcccaaaaaccacttgaaggctcacaaccatctgttcagctacagtgtactcatatacataaaataaataaatctttttagaaaaaagaaaagaaaaaaacaagttaacaatgggaacttcttcaacttggaaaagttttgggtttgtttttttttaaatgaaaagtaaccaatcctatattctttctctaaaacaaggctgcctgctttcacctattataggcagcagtgcattgggaattctagaaaagtaacaaagtaaaactccttattttcaggctatttgactgtttctttagaaatgcttaaggaattcacagtaaaactcttagagctaagggctagagagatgactcagtggttaagagcacatatgctcttgaagaagaaagagccaagtccattttcaggcacataaatcagatggttcacaagtacctttaactccagtcccagggagtccagttccctcttttggacacacgaggttgagtaacctgaggttttgatcttagccattctgagtggtgtaaggtggaatctcagggtcattttgatttatgtttctctggtcactaaggactttgaacatttctttaggttcttctccaccattcaagattcctcagttgtgaattctctatttcattctataccccattttttgattggattgtttgtatttttggtgattagcttcttgagttctttatattctttggatattagccctctattggatgtggggttagtgaagattttttaccaatctgtaggttgccgatttgtctcatcgactatgtcctttgccttacagtttcatgaggtcccatttatcaattcttgatattagagcatgagccattggagttctgtttatgaaattttccccgtgccaatgagttcaaggttctttcccactttctcttctattagattcgaagtatctggcttaatgttgaggtccttgatccacttggacttgagtactttgtacaaggtgacaagggtctattttcattcttctacattcagacaagcagttagacgagcaccacttattgaagttgttttcttttttccattgaattttaaagtatttattgattccttctaaatttcaaggcatcgattcaggcactgttggttattcagaagtgacgagcttgatcattagcagcaagatgacttgtctccttggctttgtgttatagtctagtctcctgagacaagatctaggacttgggagcccggcacagctgtcttcttcaggaaagcctggaacaccatactactcattctctgccacaagttcgagaagaagaccgctccatgattctgtagccctaggtgagtgtttgacacagaaaaccctgtctcccaggagccctcactcctttagtctgtatttctggctgtgcttttaatgaggagaaatgtactttctaagtcatcatttggaagtcagggatatttacatacaaataatatacaggctgagtattcccaatccaaaatctaaaatccagagaactaaagtatgaaacctgttgaatactgacattttatacctcacctcctgagacgggccacagccatgaagcacactaaataaaatatatacagaattacctttggactatgtagaaagggtgtatatgaaacataaatgaacctaatctttacatgtgggttctgaccccaagatactgcatgatgtgtatacagatagtcctgctacaagcatttcaggtaagggatactcatcctgtatgcgttagatacataatgaatgaagttgtcagagctcccactgttgcaaagcactcattcattttgaattcaagatttgactaattataagtagtcttgactgacaattcaatatttaaaccataattttcatcattatgagcactctgctgtatatatactgtgctaccttaaaaccatttttaaatttataataatttttttttgaaattacatctcccttccctttctcccttcactctatcccatgactcccaccttgctctcaagttcatggtcttctttaattgttttatatgtatatttctaaacatataactataacatggtcagtccatacaatcttacctttatttttttaaaataataattttttaaaaaagtttatttagtttatgtgaggacactgtagctgttttcagacacaccacaagaaggcatcagatcccattacagatggttgtgagctacaatgtggttgctgagaattgaactcaggacctctggaagagcagcctgtgctcttaccctgagccatccctccatcctcaatattactgtcctatgtataatctcattgctgaccctttagtatttgatagctgattgaggagctctcccataggagaccgtttcttccactttcagttcttggaatagagtaaaggccttcgaggtttttttcccttcagtgttaatctgtctattaatgttatttttcaggtcttgttttaagcagccatgtgaaaccatagttttttagtttccgggttttttttgtttttttgttttttgttttgttttgttttgttttgttttgttttgagacagagtttttctctgtatccctggctgtcctggaattcactcactagaccaggctggccttgaactcctacttacttgaagatccttctgcaacccatgtgctgggactcgcaccaccatcacccaactaaaaccatacttctaacagtttttcagcaaacaacttaatatttttgtccatgagaggatttagccaagttttcttcatctaacttacaagtagtttcttcttaagtgaaaggttttttgtttttgttgttttgttgttgttgttgttgtttttgtttttgtttttgtttttggtttgttttggttttggtttttcgagagggtttctctgtgtagccctggctgtcctggaactcactctgtagaccaggctggcctccaactcagaaatccgcctgcctctgcctgccaaatgctgggattaaaggtgtgtgccaccacacccagctttaaatggacattttatcttctattgttaacatctagtttttaaccaagataaagatattactcaatggtttataaaatgatttcataaattcctgtctcaacagaacaatagtcctgttagttcatgactttaatcttcagtttaacataaaaattaagactcagaagatgtcacatacataattacttcctgggatgagttttaagatttttgtgagtcttgaatccagtgggttttttgctgttgtgtttgtttatttgtttgtttgcatattagttacttctttatttttccattgaaattcgggtaaaatgaacagaatataatgtacttatatgaaagtagacaacagaatgcgatctagtacactggcactgttgtttagttcagagcagcatacaaaaaaaaactatgtagtaagcattcatactcctcccttatagcgtcattgtttatgtcaattttgtgtgtatacttatagcccttcattcacctatccaccctgataaaaccagtctgctctgtgctgctgtgtattctgtaacactttctatctcatcattgtttaaaatgattttaacataaaaactaaatttaatataaaaatattatctatttcatatatattaattatatcttacataatatatcacctgtatgtgatataattaatttactatgataaaaataatagaagattaatgtaaagatattgtaaagcatgtttataatgaaggtagactagcatctaaagtaaatgtaagccaaagaagaacgtactatagtccctgattgcacaaatatttgttgactgcctccagctcatatatttacctatcaaaccatatattttggtgagtgtttctagtctctaggtctaaagtatgaatgaggtacatagaaaggacgcagtgatggattgctacatccagaagagcattctgatagatgtctttattttctaggaacatggtcaagtaatatgtggtggtgctttttgaaccagctctgatggtttagaccagcattctttttgttactaaagaatgatagctttcgggctggagagatggctcagaggttaagaaaactgtctggtttttccagaggtcctgaatttaattcccagcaaccacatggtggttcataaccatctttaatgacatctggtgttctcttctggcctgcaggcatatatgcaggcagaatgctgtatgcaaaataaataaatgaatgaataaataataaataaatctttttaaaaaagaataactttcaaaatgttgcgcatctatgttccacttattcactggaatgagtttgttagcctagtaacaaccttcattgagtctatattgggttagtctctaggagtgtcttcttcatagaccctgagtttacactgtggcaaagaactaatcccctgccagtgtgctgttactagaagaaaaccaactattgaataactagaaaagaatagggatacattaaaatccaggcttaaaatacaagtttcaatttgactatgatttatagatactattgcttctcttctctgtcttttcaaaactctgaagttataatgttaacattagattataaataaggagacaaaatggattacagcctgtggtgtttctcttgatgctcagaagaggccttccattttctgtgtagatatcagttagtaaattattgcctattgctcttctcaatcttagcatctcattcacattggagtgtctggtaaaatgtgagtgcttacaagaactttagagagctaaaacaatttaaatgctttaggaaatgttctgaagagcagtaactagctaattttaattggttttggtctacataaaagctaaaagtactttagtgtgggacaggagagatagctcagcccagcacccatagggtggctcacaactttctattatttcagtcttatggcatcttctcatctcgcccccatgggcactgcctacatgtggtacatacacatgcaggcatacatatacccctatggcatacattctaaacatcaaagtatcacaaatgttaggtgatgcaatgaacatatttcatgtgttaccatagattatgatacttatgagaggagcatgcaactaaaggtgctgaaacaggaggaggttaaagtaacctggccaggcacttaaagcttctgaactgaatgccaccagcttactctccatcacagtttgcagggtccccaaactagactttgaatcccagactggtgatagtatatggctaatgataagatacaaaagaaaaatatccagataactccaagcatagaagctatttccttgattttatataaagtatagcttttgctcaaggaattagttgaaatgacttaccaagaacaaaagttttgctgtaagttttacaaatacagagtatgccagatcttgtttatgtttggcacttctgttttaagcaaatgtaggacacctcttggggaagggctatccatgctctgatgaatgccttttgccctgtttattgtataatatttttccacatgctgcttacaaaattgctttttttcccttctacagaattcacagaccaaatttaaatgtttcaatctttataaaatcatgttttattgtgtagtatcatttaaatgctttttttattctcatgttttgaagttttaaaaaatatggagtttattttacatcagtattccctaacagtgaatgcttctgaaaatcctgaatttgacccattatttatttgtgtatggttgaaaagctgtgtgtatcactttttaaaaagataatttagaaaagttataaattttatacacaaggaaaattagaataccaagttaggcaaatgaaaattttctgttcatttatattaatttatcttccaaattctttggatctagagctatgagctcagcagatacgagagtatactgctcttgcaaaggaaccaaatgtagtctcacaccatgtggcagcttataaccatctgtatgaaattcaagctccagaaagttcagcatcctcttctggacttagtgtccacaggtacctgtacttaaacattcacctgcgctcacacatccacatgtacatgtttgtgtgcgctcacacatacactcacacacaagcactttaaagcaaaataagagatatactttctctgtgtgttcatttcctggaaaggaataaaagtcccaattgtaccttagtgctgaagttccagttttactcacatattaccaaagtaaatgccataatactagatgtgtatcttggctttattccatcgcttgtatagcatgtcatgatgttattgtaaccttagttttcattccttaaattttatttcaaattttatacatagtatttgtaatacagcatttgatgttattaaggggtttttgttgttgctgtcgtcgtcgtcatcgtcgttgcttaagttttttaaatatccctttaagcctagctcttcatctgatacagtttgtctgttaagaaagtgtgctgttggcctgttgcacagagtttcacctcaagtgaactgacatgtgtgacgtctttaaacgctcctggcataacaggctctaaaggtgttctttctccttcactttttgtggtattggtgtgcttttcttcttgctttactccatttattgttacctttcaaacttagaagaagagccaggactgtcattcttgtcttcccaggctcaggtgcagtattaggaaaagagaaaccatgggggtctgggggagtttcctgttcattggaagtctggatttttcccctaatgtaaatgctaatgaaacattttgttttccatgttcagatcctttacaagcgaagaaagtaagaaaggtgcctcctggcctaccttcttctgtaagtattctcttcttttgttttaatttgatgttcaataaattgatgtcaagtattgagtatttacttgttacaagaatggattcaattggtgccagtgggcatactttacatagtaactgttcattgctttaacaaaatcattgattgagataaatccacacttaaggttcagctttttgttttctgtgcagtgatttgtagcttactcatatgctgtcactccctgtctctgtcatttgaattcccctcttgggaagaagactaggcctgtagctgtcaaagaagatctcctctgcaggtcttttgatgtttaattagtcattatgttgctgaacaggaggacagacagagattaatagctgagaatcttagaaatttacatttgtaataatcccaatggagctaaagacattaagattcggaggacatgttcggctcagcttgcctcagtaggactgaggttattaatatgcataaatcaccaagtcagacgttcattctgaagcccttgtggattttaaagccttcattaagcctttcccaacttcaggctagcatcaggaaagctttcacgcaactagtttgttgattccctactttctcaaaaatgtatcctttgagaataaagagctttgatgcaggaggctgggagaggttggtaaaacaatcattaatggctatagtaacctaatactgtaggagtgtttgtgctcttaatatccttgctctttgaagcagtagaagtatttgtagataaacttacattattaatccacccatactttaaaaacctctggtgagaagggaaagggttttctttcttctctctgtgtagaacaaatgctcagcgagactgttagattgaggccctgtgccttgaaggctacattctttgttgtgtaaatggatgctaggcttttattgggcaatacttaacacatgggcgcaggtgctgccagatgagtcacagctcatcagagtttggactgaatggaatgccctgcttgacaagtagcaatctagaaggggcagcatgggcctgagctttttatttttttttaaagggtaaaggacagaaatcatcttttggttgtttgcattccatctctgttatgtcctgccccctttttctgaaaagtcgaattgaaatctttgaaactcaattccagatggatctgagttttataaagcatagggcagctgtactctgaacctgcagcctacctggaaggttgaattgcagctgcaagcatcctaaacgcttttgcttgcttaagcacatggtcccactagaggctgaatagctgcttgataaacaaaatgaacaatgcctcaaatcattattcctgaagacaggaatttcagcagcagctaaaaatagttgtacgatttacattttaaaagttatgtgctgtacaaagataggtagacagtataacctaacagaaatcatactcatgtagacagtactgcaaaaacatggagcagtgtgatttcttataatactataattctgtgaaaatagtaagttagattacatattaatattagcagaaccatacagctttaaaaacaaactaataagtaaaaagattcccacatttattcttggtctggcattagttttaagaaataaggttaattgtcagtatttcatagttacttcattttttaaaacaactgagctaaatggatagaggagcctgaaaagacactttgcagagaaagccctttgtccttacatttttaaatataacatcacttattactttaagatagtttctctgtattgttttgtgttcaggaaaggaaaaactactgaattttgatgaacctttagaatgattaggaaatttttaagacaagctttcttaagtattatatttttccagcttctttggtatacacctttaattacagtcagagagagttatatatatgagttgggggccagcctggtcttcatagggaattccaggccaaagaaggctgtgtagtgaaaccctctctcagacacacacgcacacgcatatatgtctgtgtataccagtgagcatggtagtgtatatgcttataatctcaacacttgggagactaaaacaggattgctgtatattctatgccagcctgggctgtcttgcaagaccctgtctaaataaaacaataaataaagaaaattatatttttctatttgactgcttataatgaatatacagttttgcaaatctttgatgttgagaatcataaaagaagtgagagcaaaaaaagaccatgaatgtacatgttctatttcatgatgatttgaataatgagtatcatacttccaaaactaaaaatttagccaaatgttcagatttcaaatgggccaacaggtaaaaagaacagaagtgtgaaaaccaatgttttgtctaaatttagaagtgaagcttccctagattctgtagtagactcagcttttgtaaatgtactgaagcattcctcctcccttgaccccttacctcaggatagaagcagagaacagtattcagtacacgtggccatagggaggtctgctctgagcacagacctccagtgtctgggcttgcagtgactggagtctgttgggactgaacagagttcaaagggtgtgcaaggtacttcagcatggcggccatttccttacccttgagggttccttagcctcccttccctaatctctgaacaccagctgtgtatacctgtttttccttggtaggagatcattgctaagatagaaagtagaagagagtttgggacatagggcagggattggggcaactatttcccctggcaacctttcttgaatttacaaaaggaagtgtgtttagtaggatcccttcagtctccatgtcactttgtttgcaggacttctctaagtatgaggaacaaagacatccattttactataacaccattctccttgacctttgcactaatctaccccaatttatatggagggccataagaacagcttaaaaactgtgagaagacattttctttcagtattaaagtaaaaatcttggtttattcataagaatatcttgttttgtatgtaaatagttttgccagttccgtctttcctgagtagctctatttgttaattggctttgttgtttaaggactagcactgtctaaggatgatgtggccttagagatacacagaatttccccttactcgccccttttttattttatgacctggacaggttacttgacgctctctgaaccataaggacttttgtttatgtagtgctgaggagtaagctgcaggctcactgcatgctaggcaagtgctctaccactgaatcatcttcagtcttaaatctcagcttggttttgctttacccgttttttgtgtcctggggattgaacatagggcttcatacatgctgagcctggacttctccaagccacatgtcaaaggtgacagtgccagtctgaaaggttagtagaaaagcatccagtaccaagtacttacttggtctatcagatataatccagaattcctctttcttctttttttctcatatctaccactgtagcataaatttaatttttaaaactcagtttaccatatgtggctcaaaaacaagaacaaaatgaaggtgaacagataaatatcacagtgaaaaaaattatattaccacacttctgtatgcaagtaggagcctggcatacagtgaatacttgcgaaattacagttgctgttattgttcaaaaagcattcttttatagaaagagaaggaaaatttgctgaatcacagtctgctgcttagatttattctgatcattattattattttctcacatctcagggctatatttctcctttatttttccccctttggttgaacattgttatagcttccctaatgagcgtcagatatactgagtctctgttcattactctgtctcttaacttggtagttgtacttccagatgtaaataatattttatatactacaaaagatgcagaatttgaaattaggaatcaagatttcagcataaatcggtcccagagtaagcacctagatcagtctggaatgccttcttcagcccgcacacctaaactcgttctgcacctccgcattccgaagcatgcgtcaactgcatcaaaacagcatggcttcctagacttcttaaaatgtaactagcttacaggattaatcataggctaatggcacattgttttttccttaattgaatgtcacactatcttttgttctatattttaaagtgtatatatatcttcccacaaaaactgttcatataatttctttggtaagttctcaaaatgtattttgatacccaatttagaaaagttttattttctaactcttctttcacccagtgagcttcattttccaatctgaatcagagtagtttaaactctacattttcttgctttgaagcagtacagttctatgggcttaagattggtaattatagttggatgtggtggcttacacctgttagcccagctttctggaagctgaggtaggaagattgctatgagctgagcctgcattacatagtgagtaccagctagccaaaggtagatagaaaggtacactcttaaatgttaaacaacaacaaaaattaataatcctagttagaaattgttttttttttctttctttttccagtgctggggttcaaaacctagggctccattcccatgaatggttggcaagcacactgcctcctagtgacgtttcagcttacttttttgtaaaaaattaatacgaattttgagttaacattaagtcttaaatgtatggacatcatgaattagggagattctgaggtgccccaaaccacacaggcttctaggcccatacataatgctggtgtattgctctgtaatatcagatagtataaataagactaagaactacaaagaaatggaatagcaagtcccaaacacatttagactaagaccttccccccacctccccggttttttgagacaggatttttctgtgtagtcctggctgtcctggaactcactctgtagaccaggctggcctcgaactcagaaatccgcctgcctctgcctcccgagtgctgggattaaaggccttcgctaccaccgcccggctagactttttaaataagagagatgacaagcaactctttctgggtctggtaaaagtgattacattgagaaactggagtacaaaatgattggctctcaactactaagatcactgtcagggttagagctgtggagaaggagcatctgaaaataaccatcttagcaatgggtgaagatcctcctgatggtctgctccatgaggatcaccaggaagccaagaaagcagtgtcataaacaattgcccgagacctctaagactggcaagaaataaagctaacgagctgtaaacaatttttcaagccagtatcatcttccatgtaacttcacaagtgagctctgcagtttttgaacatggatcgaacatgatatttgcttagttctgggcaaacaagcatagcgggtatattgaagatggatgtgtagaagagagtcttatttccacctgtcatatagactaattctgtttgaaggctgatccaatacaaaattcccacagtggccagttcattgtctaactgtacagttagatctgtaaagggtacaaatgtccagtttgactgaaggatttcatatatcagtagaaagcaaccacttctgatgtttatggtgtccactgttgaagctgtgtcagaattgtatcagtataaacaataggcttttgacctagctctaagatgtttatttttgtcacatgccaagaaagctttgatctggtttaaagtgagaaagtaggaagaaaaaaaaaaaaaagagcagtctaccacttctctggacccagttgtctcctggtgtagttgcaaaactcacttacagggttactttctttttctttttctttctttcttttttattttttatcttttcttttcttttcttttttaattaggtactttgttcattcacatctccagtgctatcccaaaagtcccccacaccctccccctcagggttactttctgagctctgtgttccttgttaaacaaatatatgcttcaatttcattcagagatagctgtttaaccgtatttcacgtggtatgtggtggaggtcagggaggtctctttccaccatgtgggccctggggcaggcttgatgctggttacctttaccttctcagtcatcttgctaaaagtggcttttaaggcttatttttacagatgctgataatttgattctctgagttgtcataaaccagacataaataagtagccaattcattttctgtatatgacttgtctagatttatattgttgagttgtttgaatatgcttaaaccctaatatcactgtcaatatatccatcagtagaaaaccaagttgtccctttcattttttatattttgctgatatgacaggcttgttttcttaatataaaataaagacataaaacagcaaaaaaaaaaaaaaatcaagtttttaccatcaggggtgagtgagctctgtatttcactctaagttaggaaggacttccgtcctgtgtcactgtccagtatgacctttgttgtcacaaatgcttgcctttgttcagctaatactgattgtgcttgggaagttatttgttccctgggtgtatcttgtttcagggattacaatatatgccatgtagatttgtgagtaatctttcagtcatttaaaaaacactgcaagttctgaaaatgtttctaaattgccccacatgcatagtcttaaagtagatttcaaatgttttaaactattcacctatcaatttttttttactttaaattgtatttgttttagtatctaacccaatatatctatagtgttggcaatattttttaagttttcaaaaaataatctgattctgacatggcataagtaacacatgcctataatcttcccactggagagagagaggcaggaggtgagcagagatccagagctcagggttggatttttatattccttggtatactgcatcagggttcttcttgtttttcatgttcttgagacacaaggtcttactgggtagcctagactgacctcaaactcaggagtcgtccctgcctctgccccatccccatccatgtccccagtgctgggattaaaggcacttatcgctcaaagtcttttttttttttctagttagaaacattttatttaaatgtgtcaaataaaaaccccacattttcagaccataagatgtaaatacattcaacaaaaccaatatttactgctgtgaactttacagcgtataatccaaatccactctgatggttgatgatccttcctaggttacactttacagacatagcaaatcccttataatcatgtaaacaaaataactttcccctaagggatgaacttgagaacttcagtcctttctttctggacttgcacttctgtgtggacttcctgatgaggaatcttttaggaggtagagatctagattttgatcggctgcttcttggtcgtaaaatagacccggatcttgatctcgaccttgagcaggattggaaataactcaatcctattatagaaccagacctagatctcctgagtgaagctgatctcgatctccgaagagacacagaccttgagtgtcgaggagatgctgatctggacctccttcctcggctccggctgcttgagcaagaggatcgccttcccctggatcgagaatgtgatctagatcatgacccgcttcttcctcgtcagctatagcgacaacagtcataagcataacgtcccttttcaccacactcatagcatctatcattaggatcaaagggaagacgggcaggtgacctatcaaaaagagatctccgaggcatgcctgttgataattcaaccctcactcagaaccacaaatcactttcccatccaatcctcgaactgcatcctctgcatctctaaagtcttcaaattccacaaaggcaaatcctggaggatttctggcaatccatatagttcctaagggcccttagtaactgaatgccctttctaactctcctttaccagcaccagttcccaggttaccaacatatagcttggtttctcctccatgccgcctgtaacatgacttgatggcttgcctgcgtactcggctctagcttgtaatgctcacagcgtaagtagcacaaaagtggctgtacaacctcctctgctagcaatcgcagtggcactagtccactcagtcttttataaagaggctgtatagtaaatatggagtatattttttaaaaaatgagtatagtaaatatgaagggggggggacaaatggtctctgctaaaactactagatcctgttgtgttaatagtattgaaagtagctacaggtgataggtaaatgaacaggcaaagctgtgttccagtaaaacatgatcaaaatagttggtagatcaaacttgtggcttactaaccctaggttgttgacctgtgctagactcacggatacaatgtagcctctttgtcatcaccccccacacacacagagccttttttaattgtactgtcagctgctttccaagactatttcccactcgcacagtaaagtgaataagtgttaggattttctgggatttaagtgttaccttagatgatattgtagatgtgtgtatactcaagttgtcatttttgtcctagtccaacttcatggtaaaacgtaagctgaaggtgggtgctgtgatctgttctctatgaagtatatatgtgagtagaacatgtgggaaataagtgccactcgtttaacatgaacactttaacaaaagctaagatagtttgtttgtgtctgaaaacttcattttcctgatgttaatctttatgaatgtaggtgaatttttttgtagttcttaatgatttttaacttttatttattggatatttcctttatttacatttcaaatgttatcccctttcctggtttccctccctcctagaaacaccctatcacatcttccttccccctgcttctatgaggtgttcctccacccacctacacacccactcccacctccccaccctcgattcccctactaaaagctcacactttgatttgtacttgagatgttttttatttagtattgtttgaaatcagaagcagatatttctccctgaatcattaaagatacttaaggttttcaaaaaccaaggttagggttatcactcagtggtagagtattccctgtatctagcccccagtcctcaagagggtaagaatctgctactaggcctcaatgagtcccttgtgctaaagtcattacaagtgctcgaaatgcgctgggcagtgctgggacatgcctttcatcccagcactagggagacaggggcaaatgtctctgtaagttcaaagccatcctggtagttccaggacagctaaggctacataaagaaaccctgtcccgaaaaataaagaaacgaacaaaaagaaggttaaatacaaggaaaacatagacctgtcttcaagatgattatagttaaaagataaaagttaaaaattgtacctgtgaggaaaagtaacttttaacatttttctgttgaataattgtcctccaatcatagagtatactacccagaaaattatttcagtcaagggggatggaaatgatgtctgtatagctgttagcttcctcatccagagaggaacactgggtgattacctgttgtaaacagtacttcccagcttccttctctggttgcctaattgatgaaaaatatgctaacttgctttttaaaatctttatataagaaacaaatttttgttcccatttgacttctaaaatatgctgttaaattttaccccaaataaagaatgtttttacaacagaaaaggtaattcagtcaccagcgtcagctcagtattgattcaggatttgacctcatcagaaatgtaaagacttttcttctaaaacattagtgtgtagaaaccagagtacaagagacattttttccctaaagaaaaaaagtactttatttctgatactaaaataacttcaagatttaaccatctttcagtacctgtgttgtgtcatctttgtccaaagatcaccttaaccgctccccaggtagtcttgcacttttccttcagtggcttctttcatgaagagagcttacttaacagtctaggtcagatcatatcatctgaatcacacctcccttaaatcctgcagtagcttatcagtactaagccaacgtcctcatagtggcttcccagaccctcatgacctatctcctttctctcacatcctcttctgctatcttcccctccctttgtccatcctcaggtccttctgtgtatgtattcttctctctgctactatccctgtgtggtcctttgtacctgcatggctggttttctctctgatcataggggtctctcattgccatcctatataaaatggcaaatacacccaatactctttccttccctgctatgtatactaagtaaattaacaaatccatgtgattagcagtatagctatagctatagctgtcttacctcctgcaccttgcttaattaacatgaagttggtctaaactacaaaaaattatctgaattatcttcagagaaggaaaactgtagccatattttacccttttcttatagaacattaactatgcttaaaccttataaatactttaagatgaggggaaagctgtccagctttttatctgaaaaatatcctttgcttggaaagtttaccaatgtcatttccctttttgtgagcacaggctctaagtttggatacatgagaattaggagacatatagttcatttccagcatagagtcctagtattagaagatgatgtgtgaagttatatgatctttatctaagtttaacaatagtaccacagatagaatctttcaaggttagggaagcatatatttcaaggttacactctaaaggtggtatgatggtgctgccaggatctcatcttctgagctcctcagtctgtctgctcattacagctgttttttgtttataatccatttcatagtccctttgactgctctactaaattttctagccagagcatacaaagaatcatgatataggccttgcacttttcttgaaggatggtacaggagccacagtctactcctttgacaggctctcttgtcagctcaggtactcacttccctctctatagaagcttctgaagttatttcaagagtttgacagcaaatctttcgatttctagagggactaaattaatctaatgtcagacctacatataaatgcacattgttaaaatcaaatgtcaaaatcgttattgagtaaataatgccaaagttgagtaagagtttttacctgttggcaagatgccagcctgtgttgttgttctggatactccacaacgtttaagacagatgatcacgttaaatgagcatattacagggcaataaccacgtatacctcacttgtcagcacttgttgagttcagagcttttagatgcttatcttagagctcaggcgttgtgatgcggttcttgagattctttcctggatctttcatttcatgtaaagcttgaggcttttcattttaccactagtaggtgtaattatgaaaataagatttgaaattgctttgggcactggacatcaactgcaacaactctggtgtcttagtgaacagacaccatgaacaaggcaactcttataagggacaacattttattgtgtctggcttatagtttcagaggttcagtacactatcatggcagaagtatcacagtgtccaggcagacatgatgctagaggagctacatcttgatctacaggcagtagaagtggattgtcttcctcaggcagccaagaggttctctgattccacactgggtgaaggaagcttcagcataggagacctcagagcccagctatacagtgtaatacttcttccaccaagaccacatgtactccaataaggccacacctcttcatagtgctactccctattgccagacattccaaacatattcaaaccaccacatcggggtttcagaaactgagtgtatggcaagttctaaaatatttcagaatacctaacaattatggagctctacagaataaaaaaggcacgccaacaacaatgaaaatagtctcacatcttgtacacataatcagtttacttcaggatagcagcatttcactctttttaatttctttccaagaccgttgaatttataagtacaagctctatcgcgcttcaaaagtatgtgcatcatcctacataggtgccatgatcatcttctccggaaccttcctgctctagtgtatgtatactgctgcagcaatcactgcattcctcttctatcagaagtctgagtggcaagtagatagcgttagttttgttttaaacagagaagcatactcagtgcaaatgaaagaaattaagacaaaagtcttttatttaatgcaataatttatagtttggggtacagttgataataaaacatgaaagtgattgattagttggtctctctctctctctctaagacagggtctcactatgtggcctgaagtcatagcaatcttcttgcctctgcctcttgagtgctggtattagacataggagcttaggaaaggctctattagtagtcaaattgctagaaaatcttcagcataatttgatgcctggattttgaagaaataattgaatggaatgatctgaagactcattttctgaaaagacaaaactgaaacctgagccctagctcttcatccagtgttctttggcatcacatattataggctacagttctctgtgacatgagctacctatcttaatctgcagtaggaagaatataaagctcttgtacatacgtatgtagagagtctagaccaagtagtttaacagatttttatcaaaatttgtgtctttcccccaagtttatacgaaagggtcattgttatggtgacataccacatttcctggtaactcattacaaatattagataatgtttgttatactttttttactattctatttattttttattagatattttctttatatacatttcaaatgctatcccgaaagttccctataccctccctccgccctgctcccctacccacccactcccacttcttggtcctggccttcccctgtactggggcatataaagattgcaagaccaaggggcctctctaccctgtgatatgcagctagagacacgagctccggggtactggttagttcatattgttgttccacctatagggttgcagaccccttcagctccttgggtgctttctctaacttctccattgggggccctgtgttccatcttacagatgactgtgagcatctacttctgtatttgccaggcactggcatagcctcacaagagacagctataacagggtcccttcagcaaaatctttctggcatatgcaatagtgtctgggtttggtggctgattatggaatggatccccgggtggggtagtctctggatagtccatcctttcgtcttagctccaaactttgtctctgtaactcctttcatgggtattttgttcccaattctaaggaggaatgaagtatccacccattggtcttcttgattttcttgtgttttgcaaattgtatcttgggtattctaagtttctgggctaatatccacttatcagtgagtgcatatcaagtgacttcttttgtgattgagttacctcactaaggatgatatcctccagatccatccatttgtccaagaatttcataaattcattgtttttaatagctgagtagtattccattgtgtaaatgtatcacattttctgtatccattcttctgttgagggacatctgggatctttccagcctctggctaacataaataaggctgctatgaacttggtggagcatgtgttcttattaccagttggaacttcttctgggtatatgcccaggagaggtattgctatactttttaaaaagatttacttatggttatttgcctttatgtatgtctgtgtgatatgtgcgcagtgtctgtggaggccagaagagggtttcagatcccttactcctagagttacagatgactatgtaggtgccaggagtcaaacctgggacctctgaaagaacagcaaatactcagtgaccactgggccatctctgcagccccttgccttttccccatgttgaaaggcagcattaatatgctttttatccccttccctttctcagatgtgtgttcaaaacgaaggattgggtggatgttgttaagaatggtcaacatccactctccccacctcccagcacttaccaggcaaaggccatcctggtctacagagtgagttccaggaccgtcaggactacacagagaaaccctgtcttaaaaacaaaacagtgatcagcagaatttataattaaaaaatggttgttttaggactggagagatggctcagtgcttataagcactgactgctctttcaaaggtcctgaattcaaatcccagagcaagaagcaaaaaggaagagagaacgagagaggaggagaagaagaaaatggttcttttaaagtaagacagatttaggaactgcatagtttcttttagtgcgtatgatagaagctcgccttgctttactccttgagtgtcagttgtttagagataaatcttcactgaaaaaaaaaatagattgcgacctaaaaataacttaatgtacataagtttggagctttggattgtacgtcatgaagagttctatctagacaaatgtggaaataacagaatatcttggcatgttccacttctgttaaactttcaccagcccagaagaaaaagagcacacctagaaaaaaaaatcaaaatctgtgtgatgttaaaaaaaaaaaaattcagtctaaaacctgtctatactctcctttatagataatttatttaaaaaaaaaaacttttgtttgcctatagtttttcttaggttgcttaacaagttcaaagccttgttctagtcttgaacacttcagaaattctggtgtattttgaagaagttaagacctatgggtccttgtcatttggttttgtttgtgtgtgtgcacatataccagtaggcagtcctatgattatagagccttctctggaacaattatcaagttccaacatataataactctataccaggttattttaaatgatgattgagaagtaaactgcaattcatgtggtgaaagaattgctcagccaagagatccaggaactagtaattgttagtgaaggattttttttcccctcaccatccattttaacattttaaagaaaactactttgtcatggtggtgtgtgatcaaaagaagtatataccctgtgctttggctctgagatatttcagttgtggcagctgtgcctcataaaggagttgtggaaggagcaccatagaagtgccctgacacttctgttggtgtctggacatagaaatcctatttgtttacctgcttgcttctccaggagactgggcagctcttacacattctcagtatagtcttgggattttcgaagagaaattaaacaagtattcttgctcctgtcctccaaagtacaggccatttaattggtttctgttaactgtccagatggatattttctttattgctaatcatgaaacatttctagacttcaaattagattttgagatatttgtaaagaagcaatgaaaaacttgctatcccatgataaataaactttatcatgtgtctttgctctgtgcttggtaatggttttaagagggactcacttgtttgttttgttttgctgatgacatgagaggccagaccagcactgtgggcagactgagcacatactcagccacactgccagcatccaaaacacgtgcactagtgtatggcacagttggtagattttggttaaaatgtttatcttcataattaagacttagatggaaaatttttcccatggggaattaccaaagtcaagatcacaaacttaggtcagtggtttttttagagagtggctgcaaggtcactatgatttcaggtcaatagctgttgtctttaatgtagagcagtcatcagtaatgcggctaaagggggaaccattttcactagatttttatattcttgttttattttttgtaaacattttagagtgtgaaggtttggggtcttagaagcagtctcttcaacactcaatttttttttttttaatttgttggttggttggttacaaagtagcacatactacaaaaatgtggtcaaataagaagtctgtaatttgggtgtcttattatatgcctgacttagcaatattgccccaaattctgcaaatttaggacatgggtctcttaaatcctttcttctcctgctaaactggaaaggggaagcctcggaaatgtctgttatttgaatttgtgcactcacagattctgttcttcccttgtttttgagataagatctcatgacctagcccaggctgtcctcacacagtggtcctactgcctcagcctcttgagtgctgcgattataggtatatgccgccacagtagggagtttctgtgtttaaccctcctgcatctcttttcaccctgaccttccttggatgcaataatttgtaatttactgaatacatccttcaaggattatggacctaattttatgtaaacttttaaatttgctttcattacccttaaagtctaccttctagggactacttttcttagaaatgatgccaactttttatgaagaattatttgtgtcatgtttagatttacttttctagccagattggatgtttttttgggatagtggaatgtggcatgcttagaagtgtatacggtaagattaactgttaaactgtctatcaattacaattttctttggaacactgtgtagaattttatgtcacatgaaacattcttacttaaggataattttgacaaatatggttttaacgagatatggcccttgtcttgattcaaatactagaaatgaagctgaacaagtagaagactaaaaaaatggaaagcagatcatttccattaattttgatgaatatctattttctcttatgtctttctttctttttttttttttttttttagtttgtttttggggggttttcttttcttttctttctttcttttttttttttttttttttttttctagacagggtttctctgtatagcctttgctgtcctggaactcactctgtactgtagaccaggctggcctggaactcggaaatccgccagtctctgcctccgaagtgctaggattaaaggtgtgcaccaccactgcccggcagaatatctattttcaatcaacagaaaatgaaaaaagaacagagacttttgtagagaagcctggaatttgaagtttcctgaaaagtccttagcatagttggcttaactgaaaatatttttttcttaaatcatcaaagaggtaaatcatttacttacctaatttaggccttataaatattgaaatagcgataacttttcttttttttttttttttaagataaaaagacaataaaccttaggctgggaatcttgggtttgctaatcagagctgtgtggctccaagtcccagtctcttcagggtctctgtcattcatcacgctgcctgtgtgctctgtgcttcccatcttgtgataacatactagttattttagggtgttagacaaaatgttgtgaatattaagtctgaccatgacctaagttcttctgcagcattgtgggtagacacaaatcaggatgaagaattcctaacagtgcagaactcctatgcaggcggcaggtctgctgaaagtcagggttgaaaatccgccctttctccagctgagtcgtttttttgtcagactgagtcataagattaacccctgacaagttcctttaaaaaagaaagaaagcaaagatgaaacaagctcattgagtagggcagcacttgatgggctagaaacattccctgtaagatgagtcgcctagggaaaggggctgcagctgttgcagagactggggatttgttggcaggtcgggggagggggttgtttgtttgttttgtttttttaaatagagaaaaagaccttgacatagaagagagttaataattgtggtaaagaaaatgactatccagccgggcagttcctaaacctcctctcaatttagatagtagtatggtgctttatggaggaggaggtctgcgggggaggggtggggggtggctttaatatcctttttctcccctaatatgagtctgtcttatagactgtcgctgtcttcagacacatcagaagagggcattggaccccatttcagatggttgtgagataccatgtggttgctgggaattgaacttaggatctctggaagagcagtcaatgctcttaaccactgagccatctctccagcatgctttaatatctttttaaattttattttatgtataatggtgttttgcttgagtgtatatctatattaccacatgtgtgtccggtgccccaggaagacataaaaggatgccctaggatttaagttacagatggttgtgagccaccatgtgggtgctaggaatggagaccagtcctctggaagaccagccttcttaattactgagcatctctctagccctcccttctacatttaaactgaacagtaaatcttaaccagttgttaattttatagctgccctgcccgcccaccaaaaagatttgtttagttttactttgattttgttgttgttgttgttgttgttgttgttggcctgattgctgccctcaaattattacattcttgcctctaaaataaaaacaggggaagaaagtctgtttccttgtgttataatagccatggctgcatagagatttacattatactgcttgttttaccagcaaagctagcaagcactttctctgttgagcttaacttctgcaggcttttcttttcttactcattgtaaaagttatttcaggctagaaaagaaaacaactgaaagttgtcagtgcattgtggctttcttctccttattctctcatgattactattgaaaactacgttgttttttgttttttttttagtaattaatagaagagagaaatttttatcttagattgattttttttttcagtttagttctgtcaaaagagaacaacttgtctatgaaagactaaaatttacttgaaaggttttaagacatggcattgttaattgtaaatcaaagcttttcacacagttctccaagggctgaggcaggcttttgtggtccctcaggagggaggaagttgcttgtgctctgagactggcatttaatagctgctgtgcagtgatgttcttttgcagctgctgctaggccttttctgtatctggggagagtgggagcgctcattgttggcctgatgctgtcagcttttgaatcctgtgttagctggccctattgcctggtgctgtttattactgtgactcaatcagtatgtttcctgagaatggtgtttgtttggggtttttgtttgtttgattggttcagtttttgtctcttacagactagtcatagaatatttcaatggatttctgcctcatgaaaagtgtgttttaaaaaggtgatgtgtccctttgcacaatcctgctgttatctttgaagtacagagagaagaaatagtacaaagagggtttgatgtgggtaatgaaaaaataaaggttgttactctgtttttgtgggttagaatctacacaaaatgataaattgtaagagtgttttagatagtaaattgtgtctgtgtgaaacatacttagagacaaagcttcaagtctttgactttatagtattagcaagaaaaatcagacatttttcctaagaaatgtttttaacatgaatatataactataaataatgattccataggaataaggggaaacttctagtaagccatatttacttttctagctagaatgcaccttttatctctacactcaccagcctttcaatctttaaattataacactttttcctgttccatcaccaaattgtttattacatactagatgttctaaagaatgcattcctttgtaaactcttcattagtgttgtgaatgagaaatcgaaggaactttataaaaaatctttattcattaaacttttccttttcaagaatgtcattttaagcataggtaatttttttcccaagcataggtaatttgttttgaagataatttctaattttaagaatttttttcacaatgtaacaaaacaaacaacaaaaagaaaattctaaaacacagtacgttctagtcagtgaagtggtccttaaatggctttctccaggaagtgattttgaacaaggcttaactgtctggatcctccttgtcccctatgattcagtgtttccagttcctgattgcttgatcatgtgtttatcagagttgaaagcaactttagaccatgccagatggtaaagtaactagaggtgtagcaagcaaggcttcctttcacaagtgcactaatttaattcaaactaaaaacagattagcagaagattgtgcgctctccctctctctctctctctcacacacacacacacacacacacacacacagagagagagagagagagagagagagagagagagagaattggtttttcttttgtacatttacctttaggatacagtatttctttttatttaaatacagtgtgtgacctttgtatatttatttcaacattccaaagtttgtctctttggtatcttccaccaatgctaggatttggtggaaattgaaagaagttgattacagcataaaccctccctctgtgctctgtgagttggttcagtcctattttgcataagttccttttgagtagttccatgtgtgaatgcatagtactgaagacttgtgctgcctgtgtggatctatgtcttggagagaagctgtgtgcatcagctgcaaataacattttaaaaatcaacatgtactgtgcttatcctgtccctggaatgggcaacaattctttgatgtattactacaatgggaaaacggtaagccttattctttcttcatacagtgccttactgacttgtttaatgaaaagtggtgcaatttaactgcattttagtaaaattcaggcaggttttattcttttaccatatgttagattatatatttatttgtgtcattgaagtcatgtcttcaacagttacttggaatagtgacttcagcagcttagtagttgttggcttttatttatttttaaattagtatatacttgaatttgagttctttttagtttaacaatattctagcataagcttgaaagtacccttattttttacattttcgtatattctaacataacgtatacataaagacatgaacctactgagtgttatgtgatgctctgtagctggacgggagagatgaaagtcatccgggtattcataaaaggaacaagcgtgaagctctgggagtgattagggagcagtcagctatcgaaggccgtgtttcctgtttggagtttcaggtccagcctgactttcctgggataccatctgtttctaatcatgctagaattctgactctgtggagatttataacataaatcactatttttttaaaaaatgcatttctacatttccaaataatatagtcctggtcaatttatagcccatctttagatgtttaaaaatagtttttttgtactgctaagcaagaatattttgttttttaattacttagtattaactacttattgtatttctgaaaaacaaatctttaaaagccataggaattttgtatattgtaaaaagtatcctgagaggtccagagagagctgccattgtggaatatttgctgcgcattgggaagcgttaccttacgccacttactaacgctcccctgaggtcagcagctgcacgctcagctctgctctcagtcgctcacattttatgaaaatgcatttgttgtagcgtaagtaatttttgtggaaaagcattttaaatattggcattttaatttttgagaaattaattacatttccctaaaagagtatgaagttcagtgtattcgctctttcctttttttcacttgaaagtagcatgtgctgttggaggccaacgagcaccggaggaaggttttcatctgtctgctgctcccgtgcttcggatccatctagtgggttcattgtggactcttgagtaacctttattagtagatgatagccaggccaaagaaacattgaagctcattgcaagtatgtaatcaagcttccagtagtcaggaccttcagagcatgtgggaaaaagattcaagtgggcaagccaaagccacgttactttctggataatagtctccttgtcagctgcctttcaaatgtaaaatatcaaataaaataaaaacctttttgtgttcaattccaattaaaaagaagtctgtttaaagatggcatggaggtgtgtgagcatacacacatgtaaattcagtgacgtgcacttcccaaatccctgtgctatgactgtagctcagctcactcggcctcaggcgtctctttgttctgcaccgagtggggcagcgggacatttttgataatataagcattccaagtttatggtacatggcatagctggtattgtagagatgcagagcttgaaaattgatagccctgtgcctaacatagatcaaaggggacctatatatgtccttggaaaatatatgaggcaatcatacattatctcagtcctgtgtcatgagagtctacacatcttattgttttatacatggttattctctactaattacaagaattttattgacattatgagaaacattcctaatacctttagttttcttcagtaagatcactattaactgtgtaatcatgctgtctaaagtgtatgtgaatacatcatcatggtgactattagcaagtgttagcctaccaagttttcacgtaaaaagtaaaactacgaatattttgacactaaaatgaaatacacttcttcacatgattaatggatttttatgtaattttggtggtaaatgggttcagtttaggtttttggttagttccattttattgattttaaatgatatatagaacattaatattttaaatgctagtacatttccattggttttatcgtttacacggcatagcaggtgttcccagaaaaactgagcagttttggtctgaagcacggtcccttttctttttcagcttttgattttaaattttcagttttgttccatgtatctgattggtttgagatcttttcataaacccagtcagatgctaggaaaagtgagattagccagagaggaagagcctgtgtggttagtgttacactcattgggaacataacagagttaatgtgtatatgcagaagaatcagaataactctgtttttccactatttgaaaacagatgtcctgtgtcacttgtgtgactgtactgtgcagtgcactgtaaaatattaagctccatggtaaactggggaactagaactactcttgaacagtatgcttttttaaaattttaaaaaatatcagggaatagtaaatgtctgaggcttcatttttaagaatttagccttcatttagtcctcctattgacacaaatgacgttcttcaagcaaaaatgtagtcttgcagggacattaagactggcattgaattcagcctgtctgtaatctgagcagcctcttttattatttttttattatcattatttcgttggttaaagggttcaaggtgccatgaaccaaagatacctcaaactttctagttattttaaccagtgaaagacaggacaaaagccaaagttttaaacttaagcttggaatcacattctgaatgctgaacttctttagatagtatctgggtaaaaaaagatagaaactaacactattgcaggagccactccaggccatgaaaaactttatgtctgcctcctttcagtcagaaagctgtcttcatttagatactgtgagcctcatttcataaataagggcaggattgagaggttgaagtaatttgtttaaatcccaactagatagtaagttctgagttttagtctaatttcttctccaagataagtctttcctttatgtcatacaagtgaatttgtctccacagtgaactcagtgagtcctagttgccactttgtctgtattgcataacaaatggaacagggaagacactagaaaatgtctgatcataatgctaattgtcttaattcttatgggtgtggcatgtgcacgtatgtgtgtgtagctgtatgtctctgtgtctgactgcatgtgtgactctgtctctatctctgtctgtgtatggctggagatagaacccagagcctcaaacatgggtggcaaacactttaccaatgacatctatctccagcccagtcaagcaggaattttcaatttttgtgtaagacacctgttaactgttagagatgttaaaaacatgagaacttaaactgtctggttcccttttctaatacaatccattatattaaaaattagtttagctgtggtttggcctttctgtgcccatatactatgtttcttcacaaaaactagaataacaatgaactcattatattgtaaattattataagacttatttttcaaatgaatcttttagtgaccatcagtaaaagctcacatgcatgagtgtgcgcgcgtgcgcgcacacacacacacacgaaagtatataaaattgaagctttgtcttttggagaatttagtattagttactgtgagagaagaaagtataataatgtattcaaatgtgtagaccatctgtgggcccagcatattaagtgtaccatttttatgataggaagcatggagtcatgcaaaaattctctgaacaagttatgctaaaggcattgaatgataagaacatttgcataaatcagggggatggggctaagactgtaatataaactcaaggaagttggattttttttttctttttctttgatctaattcattgcagagatctgtgaattaaaaccataggccttgttaggaaaggttgctgtcctcagtctgctttagtcctgcttttggcataagtaaacattgctttctgcctgcccatgaatgtactggaaggagaccagggacttcttgctcatctagtaatatttttcatgtagataacttaaaggtgatacacactgctcagcatattacctttgaaagtaaggcccaagctgttcttttaaaaggctattttctgaaggaaaagtgtgactgttcgaaaaacagttgcagatataagaaaaatgaaatatacttgatgatattaaaattaagtttaaagctatgcctcatttaatttggggattttttttcacaattaaaaatggtaatattaaaatgtttgttcccagccaggcggtagtggtttaataccagcactctggaggcagaggcaggtggatctcagatcttgtggccaacttggtctacagagtgagctcctggacagagaaacccgtcttgaaaaagaaacaaaaccaacaccaacaaaccttgaggcactgaaaactgtaaataccagttatcctagagaagaaagtttttacaagtttctacaacctagacatatgtctggagatttaatggaaagagaggggaaacttagaaagttaagcatatttctcccacttacagaagctcaatgagcctgagcagctgcctggcagaggaggaagactttaagtggatctgcctgtccccgtgcttccttcactctgctgcctaatgctctgggcgtggcacctgtgccactttagtggcacgatctaagtcttggatgctaaattgacgttaccataaaaaccctagtaacagattggcctttattgcaatatttaccattttaatgttctatcagaatacttaaaacattaagatatttgtcaaatgttaaactgccgctcataaattcactttaacatttttatatagtttcctttgaggtcctatgtaactttgattagaggggaaacaaaggagagtaggaagacctgaatttcagtcctcacaaatcaattaaaggttggttggttggtttgtatcctagagtacatgtagatgcatatgtgcataaatactggacccaaactagttagaagaaagaagaatatgtttcttcagagctgtgccacatctctattgtctggcacttgttggaatataatttttaattccaaaattttatatactctttaacggcctctttttacaaaattcagatcttagaaattggaaagtggaaacctctttgttttattttgtactgtttgtttaatagtattttgtactattgtgtgttaacatatctaagtaagtcagcagtaacttaattgaaaagtcaatttgtccaagagttgcctcacggttccttcgtcctgcagtgctggcctaagtgcgaatgttttacagtaccttcccacaggcttacgcatggctttactacagggtttcagttaggttgggattttccttttctgttgatctggactttctttctcttttttaggttttacattcagttagattttataaaatttgtatttgtttactacatagtcaaattgcataagccatcaagaaaactcaagtggttatttatgaatatgtttttattttaaaactggtaataaattacccaaataattatttttattttatatgtttagaagttgtcataaattgtactgaagataatttctgtgactagtctacacttttctcatataggtggtttatgttagcatattttaaagtttttaatgatatcgagtatattgaattgttactcaaaccatcctaacaaaagagccgatagaactctacacatagaatgttcagaaaaatgtatatacttcttctctgtacccagcaagcatcgatgcaacctaggcctcaggcatgcttgggcaagtaccctatctcttagccacactcccagccatctatgtttccttattacaaattaggtgacaattttcaaaatgtttcgagaatttgggctgcttttcatattccttggagtatatacgatttcaaaatacttcttttaaagtattctgtgtaggcctaaacatctgggtaaagaactgttagccatgtgtggaagtttaaattaaaatgaaattaaaattcccattcttctttgtacagtctacatctcaggtggccactggataatggctgctgcattgcattgcacacaggacagcattttcttatcacctgaaggtcttcttttgttctggggaagggccctgtaagtaatagtccttcccctccttgtcttttgagcaattcagagtatcagccatcagaatatggacctacctatctttttagctaaagcttctgattttatgtggggtgtgtgtgtgtgtgtgtgtgtgtgtgtgtgtgatgttgcatcttttctcattatgcttccttgttgtacagtgctgttcccaatattaattacaaaaagggtgcattggaaaatgatggagtgcacaatgccaacctttagagttccagagttctctgcaccaaatctgagggtcattcataagtctaaactgacgcatccaaggtcaggaggaatttttgccaatttgctacagttggttgcatgaagtaaactattctaaacataattgcatagtcactactgtaaatatacttgaagtgtgagacaatgtctctccttttttttttttttaattaacctgagttacactgtatgagaacattcaagatattgttaagagtttgttcttttcaaccagacttaatgatggtgggaaaaagtatggtgcgatttcagttgtggtctgacttaggagtatctgttgagcagataccacaaacagtgcctttacaccttccttaaaggcaaaatggcatttctgcaatagctggctgtgcctgactttctgaaactgaagctggaactttaagcaaattactgtctagaaatgaaatagaacatttctagttgtcttttcctctaatatctttaaaataatttgactcctggtagattttaatcgtcttaaagaataagtactcgcttctgtctcttaattctaagactgtttgttgtgctacagaatcatcctagagatttaaatgtatcattagctaaaataaaaaagcattggcctctgtgtacaggtgattggatcatataagcagcctggttttaatttgtagccagtactgattgtgacgggggaagacttgctctttttgtagaattggctgactgtttcccacatctggagctaataaactccctgaccacatcagttgtgctttgatctgaactgagactggcacaactgccggtccgtagctctgcatctgtgttttgcaagccacgactgagataccaaaagcaaagttagaacgttgccagagggcctttgagagccacagactgcaaactgtttctatcatgaaaacctgaacttgtactagtgtgtaaacaataaagatgcttagagttttatttaccatcttcatttgtaaggtcttcttttaggggggagagtttggggtttttgtttgtttgtttcgagacagactttctctgtatacctctggctgtcctggaacttgttctgtagacaggctggcctcaaactcagcattgtgattaaaggtgtgagccattctgttcagttttatcttgtaaaggttttatttccaaaatctgtgtgtagagatttttctctttaaaaaaaaaaccaacaactttgcatttaatatgaggtttcaccctcgttttctggtcccttgagagcctgtgtgtgcaggtcagcgtgtacatgttttcctctggtttgttttactggccttagttccctcctttatgtgatagccattactcttaatttagcaaaagtttgtgaatcaaaatagatatttctctttgttgttgtcataaaatcaaacttttaaaaagttttaaatcttaagaactttgtatctggcatataaggaactgatggtaccaccatgccgggctttgaaaagaaacttaagaaaaagaatatagttagattcttttcctgaaaaatgtaacacacacacacttacttaaatctagcatggtttttttttaatacctctaaagttatattttatctttttattattttatgtatatgggtgttttggctgtatatacatttgttcatcactttcatgcctattgcccatggaagccagaagagggtgttgaatcttctagaactggaattgtagatcataatggatgagcctctacggggggtgctggggacagaacctgggtcccctgccttttgactactgagccatctcctccagctccctaatacaatcttttatgaaataggtttaaactagaagttatgttaaatacatacgtgtgtcacattctatgtcaagaccttatgtataatttctaagaacatagcttctcccaaattttttagggaccacaggtgtatgtttcttttatgtgcttcaataggctgtgctcctatgagtagagtcaactaccacaaaacctgtgacaaatgtcattagaaactgatcaatggcaattcagaacagtgtactgccttttgttgggggtggtaggaatatagtatgttagctctcactggctactgaactgcattttcagaagcaccgtgctagacatctgattatagatattacctcatgtcatcttcccctttgaggtaccggataaagcaccttatagatgagaagttcagcactcaagaagactgggaatctgtatggttaatgcctttcaagaagaataaattttgatagcttgtgaatatataattgaatataatttttgtaattttttttagttgttctcattttagccttgatgtaagaaccagaaccaagccaccagggccttgtttctacgctttgctaataagctgtgtgctttgaacccaattctctcctgtcctgttctgctgtggaaagttaaaacacatcatatactaaaagtcttttttcctacttctaagatgtaactgttgctaagtttctcctatatacttccagaaattcttttttttttaattaggtatttatttcatttacatttccaatgctatcccaaaagtcccctacccactcccacttcttggccctggcgttcccctgtactgaggcagataaagtttgcacaaccaatgagcctctctttctactgatggctgactaggccatcttctgatacatatgcagctagagacacgagctctgggggtactggttcgttcatattgttgttccacctatagggttgcagatccctttagctccttgggtactttctctagctcctccattgggggtcctgtgatccatccagtagctgactgtgagcatccacttctgtgtttgctagtccccagcatagtctcatgagagacagctctatctgggtcctttcagcaaaatcttgctagtgtatgcaatggtgtcagcgtttggaggctgattatgggatgggtccccggatatggcagtctctagatggtccgtccttttgtctcagctccaaactgtgtctctgtaactccttccatgggtgttttgttcccaattctaagaaggggcaaagtgtccacactttggtcttaatgaccatacaatatgtatgattttgtatatgtcttcataatgatgctaactttctctaagagaaatttaaattttgttttatagtgaaatataatagatatactcctaacaaattaaaacaaaattaatttcttatgctgctaagattaacttactttcccttctttcttacttctggtgtacttttacaatcctttggggaattttttttttttttttttttttttttttagttcagaaacaatagtaactcaatctctgggtgcaacaactaaaatctaatcttgtaagccttgtttaaatctgatgcctccagtggtgaatccttgtcgatccgccatgatacagggaaactctagcagctacatcttacccctctgctgccctgtctcttgcttcctcagtgactttcttcttataagacattttgttggcagttggtgttaaaacagtctcactgccttgacaaggttggcattgaagccatccatcctcctagttactgggacacatgcattagccactgtgccaggcttcatatgtaactttgttattttgttgtttttgcttttcttctaagtttcagtagtcctaagaatgctgcaattatatttcactcattatattatgttttatttggatgcccatttagttttcctaaggattgtgagtgttggccacctgatagttcaaaatattcatagtttccttatctaaagcaaatgttcactaaaggaaattattacagccctaacaatgaaataaccgttttctcaaagatatggtggagttgaaagtgtacctgaaatttaagaataagacagaatttgctttgatttcctgtttgtttgtttttttctgtttgtgatatctactaatagagataagatagaccttctttggttctttgtggaacgtagatctcattttatgtaagtaatacatttgaattaattatcctgttttgttttaaggtatatgcaccatccccaaattctgacgatttcaaccgtgaatctcctagttacccatctcccaagccaccaaccagtatgttcgctagcactttctttatgcaaggtaagcactaccacacagttgttagagccagccagagctgtcagtgtgctagctacagtgtgagaaaacaggagtatctgtgcacaaattcaggcagtgctttttaagggtgttttgttttgttttgttttggtcttgattttttttttctggagccagttaaaatttagccatataatattctaggggcattcactgctaattttaattttgttaaattatccaacaaatgtttggattggttatctaactagtgactgggaaaaataaataaagctgccatggttgttttagaatgttaaatgacaaaagctagaagcaatactggtttctggtttggataccagttctatatcgcacatagtattaccaacaggaagagtaaatatcgaaaactgagtgagacatgttggggaagagttgttacatttcttctgattcctgtctgatgaatcatttttgtttgttcggtcttctgtggttcagtgttgtgggaagtgtgtatgtggaagagggtccgttgttacataaagggtttcttgactgtgctttgggtgtgaagtcaccgctgacatctcatctgaggcttcactatataatgtagtcactttttacctaggcttgctgtgggagaaacctctctgtcccacgttttcagaatgtctgatatgatgtgtgttgcctgttatgggttaaaacctttggtagaacatctaatcaaaaattaaatgcaacttgtccccagatttcaagtgtttgtttaaactttcttggtatgaaatatgtcttttgaggacgtatacttgagttataatgacccatctattacagtttgagctggttttttcttactataaaatttacttcttttaaaatagtaatttggggcctgggagggaaaaaaaaacctgatagaatattagattaaagaaggggagcaatatctgcaggtatggggtttgtgtctgttgctgtgataaagtaccctggcataaagcaccctagagaagggtggcagtcacagcaggcaagtcaaggtggtgggaatgtaaacacactgtgacaccacatcatggtccagggtagagggaagtatgtgtgcccatattctcagctcacttttttcattcttaaatagttcagggaatggacaacaaaatggtacttttcacattccattaacccaattaagaaaacccctcgcagacatccccagccggtctgatctaggcagtcttgcattgaattaacttttcctaaacggttctagactgcagcaactggacagttgaaaacacacatcattatactttttaatttttttgtatgtaaacaaaaggaaaattctggctagaaaaactttgtatttgtttttcttttcatttagatgggacccacagttcttctgacctttggagttcatcgaatgggatgagccagcctggttttggtggaattctggggacctccacatcccacatgtctcagtccagtagttatggcagccttcattcacatgaccgcttggtaggctatcaaataatattttttcctcacgtgtttctctttgtataaaaattgattatgccaaaacttctgaacattgacatttttataggcttcctttacaattacttttttcagtatggctaccctaccacactaggtgctaatcagtcatgggtcttgctcattttatccttttatacagattgtctagtgtgcattcatatattcagaaaatacatgttctttattcattatttgtatgtatgtgaggggagggagagcagggaaaagagcgattgagtgagcaacatgcagctgcgagctcagactgtcatgcatgctaggcaagtgctccacactgagcagtctccccagccttcagaacacatgtgatatgatctgtctcttttcccctttcctagagttatcctccacactcagtgtcaccaacagacataaacacaagtcttccgccaatgtccagcttccaccgtggtagtaccagcagctcaccatatgttgccgcctcacatactcctcccatcaatggatcagatagcatcctaggtgagcttctgggttaagaatacttcctaaccttaattttagagttttgttgaaatccatagtgttcaataaaagttttagtatttagttttaataaagatataagaagataattaacctttaagttctattaatctaaaaaccaataaggaactcatttttatttttatagattgttaaatacagcacataagagtgttcccgattcactgtgatatatgaagtcataagccagggtacccttgaagtaataggtacatgcttaagaaaggaagtagcattcctcatgctctccatgatttgtttgcctatttgaaccatccaggaaccagagggaatgctgctggaagctcacagacgggtgatgcacttgggaaggccttggcatctgtaagtactgggcttgcacattatactgagtggattttgtactcatgaactaaggtttagattttttgggcagtaaatgccatagttagaacactttcaacattattattcattgaagagctgttttttgtttacattgatacatattattagttagttcatgattaacacctctctttccttacttaaaaaaatctgtatttgtggcttcatttaaatatgccttcatttaagtggaacagacacaaagaagaatttggggaaatatgtgtgttaagtacttagtggcccactcaaataaatcaaggagaaccaagaaagaaaatccaatctatcaaatatgaaggaaatgccttatcatgggctttaacaagataggaaatacttttatttatattttagggttttttatttttttaagaaaaaaacaatagctacagctggctcactcaaaaaccagggtgtgggtctcagaattattgaaagacttgtgctaaatgaataaaactgattcaaagatattttgtaatatagtacagctagtctttgtcacatcaaaacaatagggacaacaattacagtttattatatctgactcttaaaatgttacaattagtttgaaatgctcagaccagaaaggagagaagggtatttattaattatctataaagattcaaatctaattcttgaaatttaaattatgcttttgccttgtaaagttttttattagactattttttcttgagaagtatgtctcttagaattatattttgtctgaagtgcagtgaactttcttaaatatttgctattgatagagaaagcagagctctgatatgtgactggtagtgagcagctgtcgagctcttgaagaaagaaacctctttatgtattgtttgagtaaataaacctttctctatagctgttaagtatgagtttttttgagaaatgaagccaaatcaaactcttctaccacgtagtagagtcctgcacacagtggagcccagtaaatgtttgctggagttaatcttggaacacacataataatggtggtggtataaacccacagaaatgatcaactgtggactgagtgctttctagttgctcggcaccacagtaagcatttttgtgccctgttttgtgtaattctcaagaaaaccctgtaaggttggcattatcatccccacattatatttgtgggaactgaggtttaaaggttaagtgacttgagctcaaaagatttaagtagtttgccctagggatcactagctagaaggggagagctcatataccgtaggacccacatggaactagcctcaggctgcccttctccactgctttatgtgtctaggaagttgtgctatagggattgccttagaggtgtgcaaaataactaaagagagttgtctctaccttttttttctttttccccactgaagaaaacttgtgtaggaagaaattttcttgggtatttgattgtcatgccatgttgagcctgctcatcttagaagatccaacagcagatagttcatgcacatgtaaaggaacaagtagcatttgactactaatattaaggaaattttaaaaataaaacctccatttgggagttattttgtttttctgagaaaaatatatgtaaaaaaactatggtataaacacacagaactttgtaatgttctcagtggtctttcaagcttcctttagttactctggcatccttgattttccttccatattatgaacagcatgctagagaaactaggatggcatttggagaaaaaagtccagatttactatgagtggaggccaggaagaaatgtttaatctagctagtgggtgggctttggttgtcatggaaactcatctctgtcatcctgtgttgttactaagcgggaacagccaggtcattccataaatcatttctgtcatagttgagagtgatacattccatctggtccatcactgcagaccctcatgtgcacacttcctgtcccttcagcctccccctacttctccaacagcattgtttcttcagctttccttacagactcacattcacattaataatgtttagtttttaaaatatactaaaaaacaaaaacagtaattggaagaattaggagaaatgagagaaagaaacttagggaggattacatgtgcgaatctgaatgcatatcagaattttatgttaagtattacaaatggttagaatgtggtgtctctaatataataatagcatctatttttgatgggaaaataccactgttgtcattagaagttaattctagttccctagttgctttagaaggtctttcatgtgtgaaacaccagagggtacaacctttgttcttcagtttaggttttaaagaacacgcagaatgctgcgtgattaaacatgtaaggccagataatgcgtttgcaaaggttcttttattttaggtttaagcctggataattgtggtcttaatctcaggatagcaagaaagagaattgtacatgaaggtatttacacaaagtccccaaagccctatggattgtgcactagtttagataatagacgtgggtagatagaaggaaaggaaaaatctgtgtgtccctgaacatttgccagacaatcaccctttaagactgtgcccatggagagttatatgcaggaagaaacatctggtttatttcagggcctaataccatatcaaaacattcagtctttaatttagaagagatcaaacgagaagactgtttaactttgttgattatatcagacttctttgtgataatttatgttttgatttctatgagccagggagggaagaagagagggagaatgtgtgcgttttaatctagatagttaaatggtcagtagtccctaacaaaagaaaagaaaatccagggaagttgatgtttagaagtaattcatgaaataagtttctttgttccttagactcaataacattagcataataaagattaactgaaatgtccaaaagcttcagtgtttaaaaccttggactctgccttccagggttgggcctggagctctccattgtttctgtttgtctgaagctcctttcattagcctctggctttattggcaccctactgattggaatagaccatgactgataggaggaggagcctcatttgttgcagtaaaatgaggaatattaccgtttaagtctggcagaaggtactgggagttattcatcattggccatttaactatgagtgcctgtgggctgcatgtaaaatgagctctgactttgttcctgccccaaactctagccactaccacctccgtttttaacgtgacttttttcttccttaaacaccaatattcaataaacactaatttttcttccttaaacaccagaaaatagagagaaaaatcttcatttagaatggtctttgccaaaaaagtctgatatttaggatttctaaagaaatcacgatttttatgaaataatgtgattcagttgttttggtgatggaatgagcctgcagagatacaggctggtgaagtgatctgccatcagaaaggcttctgtgtaccggtattgctctgccactcttcctcccacatatgtcctctctttatgagagtaagaagtataaactctgctttcttccacataaaggaactctaaccagcatttgacatacttagggattgcttcattggaagggcagagctgaagaattggcagtccattcacgccctagaaagcctgtgcctacctaagtgtgagatacacatagcctagaacattaacattaattctcagcaatcatagaacctcaagacataattgttctcaaagtttatgccattttgtagatttggagtgaagtctataacaagctctttcattttcttgtttctgttttttgatccccattaactaaatactaaggtaaaaatctgttatttaaagaatctttttactgataattattatagcaaatttcacatgcagtttatcacttattaaagtcccaacaccgggaaaacaaacaaatggatgcccagggcttggccagctagagagtcaggccagtgagagatcctgtctcaaaaatagggtggacaactcctagggaacaacgcctgagattgtcctctggcctccacacacatgcatacacagatttaaaacagtgtgaaaatgatgcatatttatcccagaaactgagaattgtgaatactggtgtgtagagagagaaagggggggcaaagaaaagggggagcacagccaaaataaagaagagaagaggaaagaaagcagagtagtgactcagagttgagatgtgacctactcagcctgtcaagtgatgaagccagcagccagtgtgaggcaggggacagtgagagtcggttcaggagtcattcaccagggtctgtaaacataggaaggtcataaccaggcttaaactgctagtaactagagaagaaaaggggactgaggactctgaaacctttaagggaactggagagtaggagcgatgggacataggtaagcctgaggcctagaactcattccagtagaaattcctagcacaggctcttcatttctaccattgcaagtcattattagcacagtagtgactaggcaagtctttgagagtaggagacacaagcacaaagagggcaggctgccatggagggtgattccccaacgctttcacagttgattctcacagtgaggagtaatggcaggcaggcagtgcagactaatccgtgagtgtggttggttttgtgactgttttctcacttatctgcacctccctcatcaatgctgtattatatacttaatgaatgagcactagttgctcataaaaggtacatttgattcctgaagataagaaacagtgattgacaactataaagatgttgagacatgtttgtaaaagttttagtgtcctttgagagaaagcttaattttcacaatatacatttcttggggctaaaacagacaagtaactttttaaaggacgaaggggtaactattatgttttctttggttagctttttagaaaggagaacttagaaaacttttttcaaaggtacacaaacacccatacccactcccctcccctcccattctctccaatcctcctctctacttcacttccagacagtttcctggctgccctatccggaacttgattaactctgtagtccaggctggcctcaaactcaaagattcatctgcctctgcctcccaagttctggaattaaaagcctgtgctaccactgcccatcttttcaaagactttttgtttggtggttttaagtttggggtatgctttttgtttgtggttttttgggggcgcaagggtggggcctgtgtactggaggaggtgggatcgtttaaaacagggtctccattggtagccttggctgtcctggaatttgatatacagaccatactggccttgaaatcacagagatccacctgcctctgcctcccaagtactaagatttaagttgtgcagtactttgccagacttaatgtgtaaaggccaggcttgtcaggccatatctacaactccagaacttgcaggctaggtcaaaaggatcacaaattcaaggtctctctgagcctatcaggatcctaattactaacatagaacaaaacaacctaaaagaccccacctttttaaaaatatttttgtgagattattgtttttatattacttcgataatacattctttaaatatggtctacttttcaggtattttatctttataatagattgttttattttgaggtaaagactcacctcagtatgagcaaacctggcactgaatatgtagcccagattggccttaaagttacagtctcacctctgccttccaagtactagtcacaggtgtggggacaactctatggcttatagcttatagcttgctgtttagcccaggctggctttgaacttgtgatccttctccctctgcctcccaagtgttggtgcttgcagaggtgcagccatattcaacctcacatcttgattttctgctgataattagaaactttccaaccacaataatttaaaaaattaggtatctttgtcttttaaaaaacaataacaacaacaaaaatcaaaaaaacaaaaataaagaaatagggctggagagatggctcattggttaagagcactgattgctcttccagaggccctgagttcagttcccagcaaccacatggtggctcacaatgggatctggtgccctcttctggtgtgtctgaagagagcgacagtgtactcatgaattaaaaaaaagaaacaaacaaaaccaaacaaaaacaactgtgtttggccacataacaagcctgaggacagcatgtattatttgagtccctgtctcaaaaagaaaaaaggaaaaaaaatgacaattcaaattaaaattgggggggggatagatacctgttattcctttcacatttgaaattatgtaatttttttgtcctagtttaaaaactgaagctccttaggtctctaattacaaaacagtgtacggtttgatgaaagggttgtcactgtgagccttgggtagtatggctgagatcacagaacagcgccatgaacaggtttgtggttttgctgctattatattctgatgcatatatatctcttattttctggttagatttattcccctgaccacacaagcagtagttttccatcaaacccatcaacaccagtgggatctccttcacctctcacaggtgggtttctctgttattcataatatgtgtaaatcttctacttggagtctctgagtcaacaaaatttcaattaaatcctatttaaattatgaaaatattctgactttgctatacgttgaagaaatattgaattatttatgtgtatcttcctaggtttttaaataatgtgatggtttccaataacaattgtagctggatggtggtgacacatgcctttaatcccaggcagaggcagacagatctcttgagttcgaggctaatcctggttccaagacagccaggtctacactgataaaccctgactaaaaacaaacaaaagcctttgactactaggcttttcaccttttttatatgaaaacttaccaggggatgataatgctgggtgagcagcattggcggggctgcttaagtggttcactttgttttcctttctcctgatttttgttttgttttgttttgtttgagacagggtttctctgtgtgactctggctgtcctggaactcaatttgtaggccaggctggcctcgaactcagaaatctgcctgcctctgcctcccaagtgctaagattaaaggcgtgcaccaccaccacccggccctttctcctgattcttaacattaattttgataagttctagaactatcctatgggatgaattttttgagatactataattataagtgataatatttattaggattaagtaaaataatgtgaaaatatctttcaaacaataatcttaaaacgttacccatatttttctaagcaattttggaggggttggacttgctggagaaaaatgttttgaaaaagaggtgttactggacaagtgaactggctcactacatccctgcctcaccagtcagcctcagcagcagctctgcgttcccagtctggcctcagttacatccagccttatgctgggcttcttaaagtcacagcttttgctgtcacctgtgctttgtgtcagccacattccagggtggacatgttgagctgcagcagctgcttcaggctagtagcagtctgtgccactttttcagacatcatggcttcagctgtctagtaaatgctaagcagctgttgcccacataggcaagatgatgaaagacccattgacttagagttgtgtaacggggctgaagttacagagagaatgatggaacttagccctgctcactatcttggcactgttttaccaaaattctcagcataatttttgccacagcccgtttttacactttgttatatgacttgtctgcctttactgtacttactaatcatgggagaggagctgggagctcagcctctaagaaggcatgggtgaaactgagaatggttacgtcaagtctgaggcctcctccattggtgaggcttagctgatgatactctttcctgtaactcaggtaactaatcaaaatgtagactgctgattgtatggtggtgagcctcctttgaattcagcagtcctagagaaccttttgcacgtgatgctgttgaaacaccaaattagagtatttataaaggcacatctcctgcttctctgtctagtgtgcttgtctctacttccgttgtttacgagaacacccacaccatgaaagaacagagacagggtgagaggaaaagctctagattataaacattcaaagtcaaaagaaaaggaaacagcaaaccagcactcctgctgtggagattgctttgtatcttatatggccttgatctgttatctggaatgagtaggttatccccagttagccctgtttcctgtgttcaaccaacagtcagattcaccacaggatctgtgagcatagacccacaggcaacagattcccacaggcagcttcatggttgtcattcttgaataaatacaccttatcttcctccagagctttccaaacaagaagcatgcatttttatgtatttttatgagggagcctctgagacactgtactaatgactgggctggaagtcgtgatatagaccaaaatgaccttcacctctgcctgcctctgcctcccaggtgctgggcttaaaggcctgtgagcatttgttcttaagtcaagaagcccatagcaggatcgctagaaatctgcatatcagagttcctgctttgtcttctagcagatccttctgacagctttgagacaccacaaacagtatccagtagacgaaaagaccttttttttttaaccctgtcttttaagaaatcttttccagaaacctctcctatagacttaacctcatgtttcattggccatcacggggcctgcctcagttgcctgcatctgcaatagaactgacatgtttatcttaggtgttaggatttattcagagttaggatagaattattctgtgccattcagacagaacaggcctacccttcagcccttgaacagacttagtactttggcaacaaggtgaaagggaaatggctatgcctgctacagttcggaagtggcacaacatttatgttaggcgaatatgttcggtatgggagcttgggaggcaggcaagcagaacattccttgactttctttaccttcatatggaatttaggtggggaatgtctgtaatgttagaaccttgtaccagtcctcagaacctcatactaaaagttgagtctaagtttatgttagtttaatcaaaacattatgttgtgtacatcgtctatgagcatgcccagtgtaaaatactcgccttacttgagcaagtttccagtcgagatgagaaaatacaatgaaaataaagccacagaattgacactgagttgtggtcaagttagggcacaggcttcatgaaatgaaatttaataagaggaaagtggtttttgtgagtataaagggaagagcacagtacagatctgcataggagaaagtgcctgccctcctcttctagtcatttaccgagagggtgactggctgtgttgtggtaaactgtaacattaggattccagtagggtaagatggaggcccatgaaggcttgagtttagggtgaggttacaaagagaaactattgggggcctgaagtaagagaaataactggagccacaagttgtgcactcaggaggcagaagacaggtggatctctatgagtttgaagccagcctggtctacatagcaagttccaggccacccacaggtacatagtaagacattgtcttagaaacaagagaaagagagaactagcgaatgaactaaagcctagaagtaccctgagctatacaggagggtgtgtccattctcttagtttatgaaccagttctattccctaaagccctgatgagagtaagagcagatcagaaacactgcatacatttacattattcccagaaataattcagctcgaaccctggtcactacctagcttgctgcttttaattgttcaataaattttaacaagtgaattctctataattcttctaaactaagatctatattttagagtggctagttagtaaacaaacaaccacaggacagctacagaaattgtttcccccaaagtatgtggtctccttgtggacatgtccaccaccaaacataaagtgatgtgctcaggcagggaagatagcctattctaagtcacaccaagacttccagctcctgcacttcattttctctattctcctgtgtgtagcagttcgtaattacatgctagaggcaccagtatgattctaaatttaacctgtgtattttgccctcatgctaattttacaaagataagaagctacagctctatctgatatcagatgcatgctagctaacattatggtgtgtctagaatctgatccccaccccactcagaggtctcattcatagctaatacggcaccagtactccaagactgccaagatttttatatatttactggttattgtagttgttgttgttacatttgaatctatacacagaaggagatgctattaatgttccatcccaagaaagacatttagcttgatgacacattttcatatctcttaagatcatctttataagacagattaaggtaaaagtgattgtttcttatatttttgtctgtagccctcatagggatcaaacccagggacttgcactttctaggcaagcattctaccactgaactacatccccagcctccgctaagtgcctgtactctcaattttaacagagaatgatggtgatttctaaactagctttgtcttatataactgtatgttatcccatttgtgatcaaccacataaaatatttggttactagtatagttataaaacctttgatcatgaaatatagctcagaatttgtatgacattcaaaaagatatctgtcactgatttaaccctgctgatattctactttaaccttgcgatgtaacagtggatagcccagtctataacaacaacagcagtaataataatgtcgatggcccagtcgataacaatactaacaacaaagtaagtttaagtatgtgtatatttttgggttgttttgtttggttggttggttttggttttggttttggtttttttgagacagggtttctctgtgtagccctggctgtcctggaactcactttgtagaccaggctagccttgaactcagaaatccacctgcctctgcctcccaagtgctgggattaaaggcatgcactaccacgcccggcaagtatgtgtattttttatatatagttaaatggatgatatttaagcagtagatatttgcatggtttgtttaatatcactatctaaaaatagctagggaatatagttaatgagtgatagaacattgacctaacatgtttgaatccctggctcagttcccaacatgcacatatagtcttctgggtacaggtttctcatgtgaatgatgcaatgtgtccctctgcatcctctaagctaagctcatgaggaaccacagaagctccctgctttgcaaagcctttgtgtgcctacggactgtcatgtcttcaaacatttcagaacacctgatatgatatggctcctgtcacaggagttggaagaagattgggccaaaatggttggaattattttttttgtttcaataatttggggtctttagcttatgataactcctcacctaaacattttttagctggtgtacccagtgcattttattttagccgttaaaactgctttatctgtgtactatcagaagatgcacatgaacatgtgtatgtatctctttaagttgaaaaatggtactttatttggaaatgtactccctccccaaaggaaaaaccagttatcagctattatagcaattattgtagcagcaatcacaacagcattgctactcaattgaaacccagccagagcatggtgcacacaccttcaatcccagcacttgggaggtagaggaaggtggatctatgttgtgatttttcaggtcacccaagactacatagtgagatcctctctcaaatgaaaaaaaaaaaaagccagttatgagatgtgtatggttaagcaggttatggtacagagatacaggtaatattaatgtcatcatttatcaaaggctgtaaagccatggtggagaagcaaacatttttttaaaggatgtacatgtatgtagacaaagtctaaagaacatattattttctttaataatgtatttttaatatattttcctgggaattttacaggttttttcctgtttactcaatttactaaattgacataaataatgaaaaaaattgtccaatgttttatgcttataagctgctaataatatgctgaagggtaaacaaggttgtcattatttatgattaataagtatctttaccctttgcttaacattactatgacacagagttaattcatacatgtgaatgctttttggtttaacaggtaccagtcagtggcccagagctggagggcaagctccttcatctccaagctatgaaaactcacttcactccctggtaaggatattccactgatctttacaggtgttatagaattttgctttatagtacagaagggttttgttgttcttgttgttcttgttgtttttgttattgttgttggtagtggttttcttgttgttactaaatcttatgtaacaatgaagaagcagtaggctagcattacacaattctttgctaccacatgacctgatttagaagacaatatgacattttgggtatctttattgccatctgctttttgggatattagatttatccaagcaactggaattaaaggagtatgaaggatttttgtttttttgaaaaatattatttaatctttctatactgtcagtgtttaatgtaagaggaaatttaccaaaaaaaaaaaaagacacttaaaaatcaaatctgttgtttcataatgattatatttatattagacttttacatttatgtattactgtcattgaagtttttctgatattttcttgtaataaaaatgtacaaaccatacaagtacaacattgcttgtcagacaagtaggacagtagaggagccatcttggttctagtgctccaaggcagagaatctgtgagagactgtttgctactgttgctttggtatgcttacatttataacccagaatcacaaaatataataaaaataagcaaatgcatgtgatctggtgaaattctaagtcacatatcattcagtaattctatgttccaaacagaaacactctttttcagtgcctaacaaaatattttaagttgagggaacattgtcttctcgcatattttgcaaggaaccccaagcattgtgtgccgtttagatgctaaccttgtgagtccctattaaatctcaacctttccagaactcagtacaagtagatcttgcagacctccacattaactttactaacaggttaccaacaagcacatcagctatttcctcgactctgttggagttaatcttaacctgtgctttgcctcctgttctgtcttgactttgccagaaaaatcgagttgagcagcaacttcacgagcatttgcaagatgcaatgtccttcttaaaggatgtctgtgaggtactatttcatttagatggtgccttttttgtgtgtttcaattacttataacgtcccttactcatttaaatgatcaagctgtacagactccaacactgagcattgcagctcttgtagcagtgtgtagaagtagacttttgtcttgtttataatgacttccttttagagctgtactggcatgtgcttttggttttcagaattctaatgtgtttgtgtataaagcatgtgtgacccgtgggtagtggatgtcttaccttcaattttgctaaagagcttagctggatatgtacaccattgaagataggtgtgttctactcacctaaaacttaagctaaatagatttgagtgcctttccccaaattgacatctttcagagaccattgtacagtttttccctttctatcagctgtaattgagtattgacatagaagacttcatacattatagaagctaaaagaaataacctcatgatagattggtaaattcatcttctaaagcagtgacttgtatctgcagctttgaaaattcatcatagtctgaaaagagctgcctttttttgttgttgaagttcaggtagtcggttttgaaactagttgatactgcattgcacttgctgccttctatataatccctgaatagaagatgtagcagcttagtaaattgaatagatacactgctggtaactcctctcctcccccgtgttgttttcaacccttacagcagtctcgaatggaagaccgcttagacaggctggatgatgctatccatgtgctacgaaaccatgcagttggaccttctaccagtctgcctactagccacagtgacatacacagtttgctgggaccatcccataatgcatcaattggaaacctcaattcaaactatggaggatccagccttgttacaaatagtcgatcagcttcgatggtaaatcacggtcatcttagatgcaataatccatgttatcctaattttttttcatgaaattttggagaaaagagtttgacgggggggggggggggacctcttgattgaaagttaaaaggaaccctttaagttttcctttattgtcttcagtagagtcattggctactgttgggcctgccaaattctgctgtggccacgtacaaaaagaagaaactttagtacagagatctgttagctttagccaggtatttttcctgatatataattggaatggcagtgtatgccttggatagcaaataggaagaatgaatagcatagtgtgtgacgtgagagactgagttttacaagccccatctagctggggccgttagctggggccgtgtcacaggcctgtcatctcagctagtccagaggctcatccaggaagaagagcaggttcaaggccagtttggggaacctgtgagacactatttcttttttttttttttttttttttttttttttttttttttaaggcaagtactttattatccagctactcctgaattttgaattttgattttcttttttttttttttttaaagatttatttatttattatatgtaagtacactgtagctgtcttcagacacttccagaagagggagtcagattcttgttacagatggttgtgagccaccatgtggttgctgggatttgaactccggaccttcggaagagcagtcgggtgctcttacccactgagccatctcaccagcccccgagacactatttcaaagtaaaaaggaagctggagatgtggctcaatggtagagcacatctctattatatatgaggccttaggctcagtcttcactaccacagtttagaaaaacatcctagtctaggaaggcattttcttaatcagagaaattgtctagactaggaaagctgtttgttactatctggaatttgacttcagttacaagaaagtttaaaagtgaaacttaatttgtataggtacaaatttagcctctttcccaagtaaaggggaaaaactggtataggggagcaattttatattaatcctctcagaataaaataatttaacccatttttttaaaacatgataagaatagacttctaaagtcatatatatgaaaaaaaaatctgtgttgaatatcttgcattagtttttttatccaaattgtcttttaaagattcattttgagcctgctgaataactgataccatgtgtttgcatgtttattccatggtttttaaagttcattgaatgctacaaaatatttttctatgaaacagattttgagctatgggatcaaggctaaaacttgggtatcgccacagcacttaagtgctctaatgctggggcctggtttctgtagagtaggattggtgctaagtccccacattcatatgtccgactgccacgtaaacagctgcctggtctctgatctcagtatttccaccttgggccttagcagttagggatgttattttctgctttgttttgttattgttattgttttgtcttgggtgtagaaaatattggattcttaactaccttctaaataggttttgctgataaactaatataaaaacatttgaaaattattaaactcacatctgaattgtcaatgccataactattagaaaaagaagttgagccagacttggtgacacctgcctttaatcccagcacctgagaggtagagacaagtagatatctaaattcaaggccagctacattgagaaatcttgtctcaaaaagaagaaattttagtggtataataaagctaataacatggcactttgcagctataaatatagaaaagcagattattagtaagttgctgataggctagagagtgacttgaaaatcatattcttgaatctcaggttggccttattgatagcatttgcaatttgtatttctcctcttttaaacattttatcttcttgctattaataagacactttgtagtccctgctggcctctaactcacaaaggtctgcctgcacctgcctcccagatagagatattctgatgaggaaaagcctcataatattatacggagggatcttctaaagagtagtgtgagtgtggctctgtgggagcaccgttcaggccatggcagttaagcccaagctgttgcttagtgtatatcaagatgttgtcagttcttactatctttagagcgcacaggactgctaaataaattacctccggtgtctaaacaggtctctaccttatacatatgcagtcagcagtatttcagttataggtcatacattgcttcagggcttagactcagaaagcatctgacacagtctgacccccttggtgagccagtgctcatctctcatcctcccaaggtcagcttgttagctgtgagtctgacttaaaaccaaaggatggagtagataggtggtcacagctatgcacagccttgctcatgtgcttaagacccaccttgtactcacaagatgtttgatttagagagacattttgtgtctatttcattcagcttcaagaatctctttttattgtccttcatgaccatatattctaattgtgaaaagaaactggttttaggtactaaaactactttccatactttttctttaacagtaaaaatttgtgtttgacatctaagaatagttatttgtaaaatgaccacagaagtaatgtttattgtaggatttataaatatctttcttaaaaacatttcattttcatcactccacttacaactcagagtagttatcccgatgacacaagtatcttcagaaactcaccagacatttaaatactattttatttgtgcagtgggtttattctaagagcatcactgtaggtgagtatcccaactgtaggtttaaacatgatactgctttcttttctagcatttggaagagactgagcttacatgcaccgtgaagggaaagaaaggaatggtagctgtcttaagctttgcatatatataatctctgtcacactacttgtctctgtgtggtgagaataaggattgagtctaaggcatgcttgatgggaaagccctccactatcgagctccacctccatccctacagcaactcagttctgacactgtaaaataaaggagcctttgacaagatgtgggaaaagaacacaactaaattgtagtatcattattacagagatgggatcctttttttaaacaaacaagatttatccatggacctactgtgtcggtttcttactttgatcataaattgactcgtcagtatataaaatcggggttggtatggttttgatttggggtttgggttttcttttttgtacttatttgttttcctttttcttgattttttttttccccctctttgagataaggtctcaactatgtattcttggctggcctggaattcactatatagactaggctagcactggtcttgaacttagatcctgcctctgcctcctaagtgctggaattaaaagatgtaagccaccacattagccactactttggacgttttaagataagccaagatgcactgaaatagaagaaaagttgatgacataaatgaaaacaacctagcagaacatgggggattgggggtcgtggggactggaccagccagtatcagataggtgataacagtagctcatcttctgggccttgaaagcaaatagatgagtgagcaagatgactgttagtgtaaagtctatatgcatcatttaactaaaccaaagtccatctaggtctgtgtggtctggaggggttacagacacacctttaatgccaggagacaggcaaggagatcccctaaattcaaggccagtatggcatagagcaagtttcaggttaagaaagcttagatccaggcctggtagtgcatgcctttaatcccagtactcaagagacagaggcatgcaaacctagttctagtccatcagttctgtgcagtccgttgaagtcagtgcagtggagtaaagtcagtcagttcagttgagtcagtgagctgagagtctgtggagcacagttcagaggcaatttttatagggacagttttacagagacgggttacagagagacaagttagacacaggtaaagacagacgagccagaagattagaacagagtgccagggttagtttgaggtcaagcagagcaatttggagagggttttaggccagaaccggttagatgaacgagccagccagacttcagaaagaactagaaaaggtgagcttattcagcagtaaaccttctaaatgacagttacatcaggtgagtaaagattacatttacaagaattaaagaggtttagtcacaaaggagttttaacctattctagttatgtgatgaacatagaaattaaattatctgagagataaattacattttataaaaagagctgggaatgaagctcttgtttaaataattggggtagccctcagacatctttttaatgtttgcttttaattttagaattattttcatttacttaatttactactctctatttatatttttttatttctccatacctgccttagtcaaatataaaacatgagtctgtcttacgcacattaaagagatttatattcactttaaaatagggtttagaaatactgaaatatcagaatttagttttagttttactttgatttatttaaaataagaattaaccactaacaagaagagtttaaacaaaaactttaaaaaccaaacaagtgtagtcatcattcttatttggaaatgatacagacgcctctgcagggcacggctacgatttatagcatgagtgtaaatacctgtgcacgccgagtagcatcctgcaagtgcctttgtctgtcacaaaacatgtccatcaaacagtgatctcagccgcagacatagcaagcatgatggaagtcattgtgtttaccatcgaagcttgatgccactcctaaaaattactgagatttccaaggtacccctggagcagttgtcaccagagagcataatcctgaagaactgaggttaaaaatgaaaggagagaaatgatttaacaaagttgtcctctgacttctaaatatgtattgtggtgtgcagtaataagaaacaacattttttaaattcttaaaaggtctttattaatggtacaaatgaaatttttccatgggtctcttactttcattattacaagacctgtggaaatttaatacaggcatttttcttaattattttttggtatcccttgagagttttgaagtcaaagaaatagaataatattcttaagttttcttggccttttgtcaacttaactaaaataaaatagaaatctttatgtggggtaggtaagttggctgcacatgtttgcacattcattttttatatatgtgtatgtcaacagacaaccttggggtcagttagttggttttgttttttcaagatagggtttttctatataaccttgactctcctagaactcactatggaccaggctggcctgaaactcaagagattcacctgtctctgcatcccaagtgctggaattaaagccatgcaccaccacacctggctttcttaatcactaccttctgtttgagactgggtctttcattggtgtgaagcttcaccatgcaagtctctcgtcagcagagtttatgtctgtgttgccataaccagcttcctatgtgtgttctaaggaggtaacctcaggtcttcactttggcaaggccaagtgaccagtcttctcagccctcctaactttaaatattcttatattttcttttggacagcagttaattctagtatggtttccatactataggaattatgtgtctaaaaagaatcatacttatagccaccccacccccactgtttcagttcatttttttccctaaatggaaacttctaaatgttttattttcattaagttcacttttaaataatttttaagggcttaaataatgtttttacatttaaaattactttgaatttttttgaaaataatagaagttatacacttaaggaaataataaggattaaggaaacaagaaatggataaagccagcaaaatatttttaaacagtgtatatataaaaatcatttagtcagtctatatattaataacacctaaattaaaacaataatcagcaaatagtacaaatgaacaatttattagaacagaatcagaactttatattaagaagtttgaagtctgttctctaattcatcagctaatgagatttaatatttttctgagtgctaaagtcattggccagattaaatgaaaagaagtttcttgtaagttattccacagaagtcaagctgtaaacagcttgtgaagattcagtgtgtaagaataagtcatttagtgggttggatcttttattctgaaatgaaattcttataggaattgaaatttagaacatagcaggcctatgggtttgccttcctgctactcctccaacagtagcagcctgtcagctgtatgctaacgagttgaacaattaaaatagtcctatctggctggcccacaggctctgggtgcagacaaagaactgtttatacacctgttgttcatgtagacagccgtgtcaatgtgaagccacagattaaaggaaggatatgtggtgggcaagggttaaagagaactataaaagctgtggaagtcagattcctcagaaaaatatatgagggccatttgcaaagggaatcaagttacctagaaaaggtttctgctggctgcattaacatgggaatgcctgacttcaagtgtccttctagtctgagaccatttttaaaaggcttctatttttattacatatgccaattgacatttttttggagaccagtaatgtgagttcctgtaagaaaataactttggactgttccattgaggcgagaatacggctggcatttgtattctaattccttctttattttccttaaggaaaggtaatgaccctttgctgcagagacttttctcaggaagaggatcagtagaatatgcttttattatttaaggtgcaaaaggttttttgttttgtttggttctaatggtgctattaaaataagagaacatggaaattcagcagatacattgtctctgaacagaattcagcagctcctgggtttctcttgtataattcaaagtgaatatttgtgtactttaaagtttataaggctattttgtttttgttgtaatttagaatattagttaaaaaacaaaagttatcagggctggagagatggctcagtggttaagagcaccctggctgctcttccagtggtcatgagttcaattcccagcaaccacatggtggctcacaaccatctgtaatggaatccattgcattcttctggtgtgtcagcaacagtgtgcccatatacataaagtaaataaataaatctttaaaaagaattaacttatcatctcttaccaaaatcctgagaagttttaagcgtacaaacttacagaaagttcagcttctgctttatctcatagaggttgtctgagccacagtccctctatagcattttacctttaaaataggcccacacttcaaattagcatctatatattgtatcttgtaaaatgggattttttgtgtgtgtataggccagaagttagcatctggtgtcccccgtctggcttatatatactgaggcaggatctctcactttatctcagaccttaccaatccagccactctagctagctatcttactctggggatcctccctctgtctgtcttgcactgaggttacaagctgctgtcataccacccagcctttatatggatgctggggatctgaacaccagtgtcttcaggcttttgcggcaagaacttctaccctgagccatctcatgagccctataataagacttcctcttgggccactcagtagtctataggaagaaggcactagtaggtgttaagggcagacttgaccaagatgtctttatgacagagtcccatggctccattgaaagtttatcctgttagtctttctccactgactgttagttaggctcaggccttcaggtttttctagagtctgtaatagggacagggaacctaaagtccagaaatgttcacaggtgggaagaggttgaaagtgtgtgtcatttctatggccctccctgctttaacatatgacttcagtgcatggtgaaatttacatgttggggggcggtgcagtacagtcttgatatccaaagggaacagtgacagagtaactctaagttaattttgaaagtagctatggagtatattaaaaataaagataaagataaaaagaattctctagaagaggggtggatatgtacctaatatactctaatctggcccattgccaaatgacccaacggcctgaaactctgccttaggttctttattcagcttacaggaaaacaaaggatatttatacatcttagagtaaaatccagtcataaaagataaaagctacactaattatttgaggtattcggtgcatgataacttgttaaggctgaaggatctgttgaaaaacaatatttctgtataatccaggcagtaaactatttaaagcttaatattctagttgacgagtctgctgctgttctagggaaaagctttatttgtaatatgtttctcttaaaatagtacagtatctgttagttggtatttgtgtatgcttactttctcatttgggtctgctatagcttgggttaagtttgtttgaagcttaaaaatagatatggggatttcactgcccagagatataaagcctttggtttgctttaggtttgcattgcaggcaagagggaggaaaaataagatgctgtatatatgggaaggcgcagttagatgaaaaccattagtaccttcagtgcagggctattttactcagcacaggagcagctatacatggtaggtttccgagtctatggagctctctaatgccgaactttgtatattatctctaagagcttgtttgaagccctcaggttacagtatagtggctaaaatgtggaactcactggcagcccttttggcttctcctaactatactctatggaaaataaattttgaaacttattttgtaagtaatatctgaattcaaatattttatttctgtcaagtattttgaaatgttcaccaaaattcggaaagagtgacaccccaaaaaaagagttgttaaattcagatgaatagtactatattctctataaattcctgtataagacttaaacaaaaccaaatgaagtagtgtatgcctgtaatcctggctattcagaagactgaggcaggagagtcatttgaattaaggatttcaagaccagcctgccagctggcctatcacaataaaataaaataaaataaaataaaataaaataaaataaaataaaataaaataaaaattggccactgttgatttctttctgattattttcaccttaggtcggaacacatcgggaagattcagtcagtctcaatggcaatcattcggtcctgtctagtactgttgctgcctcaaacacagaactgaaccataaaacaccagaaaatttcagaggtgactgtttttttcattttgaccactaatttctaagttctttctgggtctacataacagactttcccttgcctccagaaggtttctaacagcataaccctaaggggtatttaccctctagaaagcttagaaccatcttggttgaaacgtgaatctagacttatgttttatgtttcctttacctcttcggtaggtggtgtacaaaatcagtctggaagtgttgttccaacagaaatcaagactgaaaacaaagaaaaagatgaaaaccttcatgaacctccttcatcagatgacatgaaatcagatgatgagtcctcccagaaagacatcaaggtctcatctaggggcagaacaaggtatatccagcccttagagctcacatgttctctgggagaaaaaaggcttaggacatgcgttcataataaccagctacattctaggtgccaggctgtggtagtgtgtttgtttatttgtttgtttgtttaatatatatttacccatttcatcttcacacctctttgtgtcatcatacaaaaagagaactgcctatctcttcttagttgcccatagtttataaaaaagacaatgactgttgttgtacgtctgccaataaatatttgacctgttaaagaactaagtatatggcaaaatctagtgtggttcatgcaagcaccagcctgttgcttattatgtgttattattagaaaccaccatatgctttggtttcatgtcatctgtagctgggtttgctttacagtggcagatttgagtagttgacacagataccatttgtctcacaaaacaggaaatagttacctttttgttcttcataggggtttgctattctctgatttcaggagtaatttgagaaaaatataaaagagaaagctttccagataaagtgacactcttaggtagagttttctagaaattgaacttgattttctttcaagcatgaatctggacattagtttctaataatttgtatatcttcctttagatttgtttttagttctacattaaaattaggtgattttgtttgtgcacacatatctgtagtattgtttttcagacattgtaactaggctggtcttgagctcatgattcccctgcctcagtcttctaagtgctgggattacagacatgatcaaccaagcccagcatgacttaatgtttttaaatgcatcctactttctggtgtctgagtcatttattgatgatgtatctatcacatacagctaatgatatttaaaatacccattttgtgtgctagattatgatgcagaggagattgaaacaatagaactaacagaagccatccgtggccctttctcccacttacacacctaacaaagagcttctttgcctttgacatcctcatagctttcaaagcccacgtgcctctcttgagaaaatgaatcttggcagtgctgtgggtttaatatgcatcttactcatgtgaagaatgtaagtgagaaagtaaattcagtcagagaattctaagactacttctcctaagcaccctaacttatcgttttattattctgaacaaattttatcagataatttgcatccttctttccatgtccattaaaaatcaacagacttttctgctattaaggggcagaacatagatacttacagttttatgggccaaattgtttctttcatagctactcagttctactgttgcagtaccaaataaccagagataatacataagtcagtctgtccttcaaaaagatttttttattcccattctcctggatttttttcatcatcatagttacctatgttttgaggccctctgtgtcttctgtcctttgtgtagtaggtgacttgcagagtcatgaaatgacaagcaggcatgatgtactcatgctctgggacagaagttcagcacttagtacatttgaatcagtggggcctgctaatggactaagggtagaagttgaaagtatgtgttgaactggtcctggtaatgctgatctttggatccagtctgaataacaaggtagtagaatttagttttgtttcttatttacaaataatttgctttcttggagaggcctttatgctaaaatttgtgatgaaaatgtattaacatacatgtggtaaagcttaactaaatgactattcaggtgcattgaagaaaggaaaggcatttccagtcacattaagtacagctgttgctcctgcctagtagggattttaatttccattccatcattataatttataatttggcacaatcagcatatttatagagaagctcataaacactgttgctcctcttttctagcagtaccaatgaagacgaggatctgaatccagaacagaaaatcgaaagggagaaggaaaggcggatggctaacaatgccagagagcgcctgcgcgtgcgggatattaacgaggcgttcaaggagcttggccgaatgtgtcagcttcatttgaagagtgaaaaacctcagacaaaacttctcattcttcatcaggccgtggcagtcatccttagtctagaacagcaagtgagaggtaagtcagcccagcagagaccggcagacacttgctttgcttaggcaagtcatctgaaagctcttggaatatgtctgccatcatgggatcctgaaaaggctttaaacttcatctgtttagtgtgcactcgtcacaatacctcttctgtgctgggcagttatcaaatagtgggggcttctcctcctgagcttccaccctctggcttgtgtttcagcagttccctaaaggtttcgtctgcaacctttttgcaaggaatcaataaatgtggctttgggccacgagtctctttgcttgtgagcaactctctctctctctcctatttgtgttcgattatctaaatgtttgtattgggtacaaagaaagtagggtaggtataaatgcttgaaagctacatcattaccattagctggaaattcatttctgtgtccgtccaagaagctgatgtataggaatggtggtgcatagtcatcctgctcctaaaatcaggtatgttctcatcttgttcaaaacccttggagtgacagagaatagctgttcataaaacagatcttacagattacagtctcctgtgagacacagaggctggtggctgctcacctgacaggagcaggaacattgtccgtccttcgccaaccattctcatagtcattcagacacacacccttcttgagctgtatctgaatgaacacttggtcccactctgaacacaacagggcacctgtgaggaagtcctgggtgcattcttctcttttcagcctgtcttgcattccattctgatttcacaagcaaagcaatttactgttaatgccaccttctctgtctgcatagaagtctgagtgatcagcaaaggtgccagaatttattactgtgtaacaccttttcatttctgccatgcgtaagagctagaagacatggttgtgttttgggtttttgtgtgtgtgttttgtttgtttgtttgtttttgttttgtgtgtgtgtgtgtgtgtgttttgttttgggggtttgtttgtttgcttgttttttgctttttgagacagggtttctctgtgtagccctggctgtcctggaactcactctgtagaccaggctggcctcgaactcagaaatctgccagcctctgcctcccaagagctaggattaaaggcgtgcaccaccacgcccggcagggttgtgtttttagaacttttgagagtggtgatgcctagcctcagatgcaagccattaaaatgagaaatgtttcattatttgtaagaaagttagaaactttttatttcacaggtgaactgtgttcatttgtagcatttgactttgcagcagccctatgcaggtccttaaagcagaaaaagcaagtctgagaggacatccaggtttgtccagctacttactaaactacctcctaactatcatgatatgagtataggtctgacattttcacatgttatgagctgtcaagtctgaggagtttttgactgattagagatgagtgaactttagacacactaaactccaactgtcctaaggattgttttaataccaggaaggccttttcttccattttcagactatgcaacctgaagcccagagccttttgtttttttttttctccactttacagctgattgaagcctccctccaaccctcctctcctcccaggcacaactttacacccttctccccattccccctccccgtttcctcagagaaggagaggccgaccatgggtacatcaagtcatagtaagactaagctcatcctctcccactgaggccagacaaggcggcacagctatgggacaggaatcaaaaggctacagcagagatagacagcccctgctccaattgttagggggctgacttaaagaacaagcagcacacctgctacatatgtgtaagggcactaggtccagcccatgcatactctttgtttggtagttcagtctctgagccctcatgggcccaggttagttcactttgtaggtgttcttgtggtgtcctagaccactctgcctcctcattccttccctctactcttccataaaactcctgagctctgcctcatttagctgtgcgtctctgcatctgtttccatcaggtgatggatgaatactctcagaagacagttatgctaggctcctgtctgcaagcgtagcaaattaccattattagtgtcaggggttagcagagcccttatcttacaactccttgaaaagcattcagatgccctctgccccttatctcatcagctcccagtgcctatgcctaatccttggcagtgtcttctaagcttggtgtagttatctgcagaagttgggatgttgggaaggctcagtacacctgcagtcctgagccagcagtttctgtaaaggcatactttgtttacctggcttagtatctgaccagcctcaacgtgaagcctcctaaggcagacagacttagggctagcagtcatcttggggttcttccagaacactttttgtgctttgttattcattgtacaaaaccccatctaatctctgccattgccatttaagcatttccattgtcacaatgattgttgacagtagcctagccatttctcttcctagaaaatttcattgtggtccaagtttgtattctcatctcacacagattcagtgatcaaacacttcttcctcccaaacccatcacatatcagctcattcagctcactgttctggataagagtggaggaaaatggcgagtgatggtgattcttaggtctggctgctaccagaattatctgcggtcttcttttaaacatgtatccaggtcccaaccccaggatattgatttgcaaggaagtgatcaaacgtggcagatatgtgtgccgataatactccactctttctgttggccattaaaatgaattaaaatggcattaatgcaaaaggacaaaaggacaaaaataggcatggggtggaaagtaggtacagtagtggtaactggcaagctcattctacatcttgcacaatatttgtctcaaggttaggatttaacattcttctaaaaagaatggtttaaacgtgacctgacagtagaaccagcaggatagcttaactgttaaaagcatgagctcctaagcctgacaacctgagtttgatccctgaagggtacctccatggctgaaggagaaaaccaactcctgtaagctcttcttcagcatccatatgggatacatatacaccctgtgtgcacatagacaatatttttaagacctgaggataaagaacatcatcatgagatttcagcacgctagggattatcctaaagcttcaagggacaaagtttaaatcaactagaaacagaaacatgattccagtgttatcagtttgggacatttctagattcttgaaacagtagagggataccttcacaaatccacttcccatggatatctcagaaagcatttggatcatagacttgccaatagggacatacacaggaaaaataaagccgagagacccaggaaagctcttgcgtaggcaagtcagtttacaaaaccctgtgtcaacttactggcctagagggtgcttacctgggggtaaaaagccttagggaaagaaaatgaaactaatgaataatgcgatgtatttgcgggtttatgaaaatgggctggagagatggctcagcagttaagagcactgactgctgttttgaaggtcctgagttcaaatcccagtaaatatatggtggcatataaccatccgtaatgagatctgacacccttttctggtgagtctgaagtctagctacagtgtacttacatataataataaataaatctttttttaaaatgaaaacatactgataggcatttttgttggtgtgttacaacattgagtaagattgtgatttcattattaaaaatgaaggaaaaaataagtcagctgttaactacaagaacagctatataagtaaactgtcaataaaattcttgtctttgcatgtatctccatggtcataatagcatagatatttgctttgcctagtaatgtaaagaatataggaatctggttccacttagatttgtatcagaccttcctggctatgtagcacattggtcagggctgttcatttacatcaaggatataagagagtgacataggcctttggagctgctgctgctgctgctgctgctgttatcaaagttgtggataccttaagtagagtctgctagaatagcctcttccttccagtcctaattattgacaaaggtcaagctggagtctctcggttcttctcaactattataatatggcccctaggtcttattgtgaaaagagtcctagttatctcagaacagtagtccactagaagagaaataagagcctgttcccttttgaaaaccttcaagtctcactttgttcttttagttgacattctgatttacccttagtctttggtcatgaaaccattgtctcaacaattccacaatacctatcagaagacaagctcctcctcttaggcagagatagtttcctgttgagaaagcagcccttgggttgttatatgcatctgagtgctaaagtataatctgagcatacataagaccatgagttcatcccagaactacaaacagggaaaagaaaaccagtgttgtattttaaagatttatttttagttatgtacatgggtatgtgcatgtgagtgccaatgcccaaggatgccagagacattggcccccagctccggagtcattcgtagttataagccactccacaagaacagtgtgtgctctaaccacttaaccctctttccagcctcatgttgatactttttatctaaatgacaaatataccatatgtacctaccaggaacccttaataagtaaagaataattagtacttttcttctttcattaattctcctcataattatataggttttatgcattttccctaaatgctgggtcttagagaagcagaatgtaaactggtattaaatcattctgtgtcaattgaagttcatagagtcaacagggtttaccataataaagcccttttctttttaaaactaagatgtggactacaggtaggcactaaaaatgtacacattcaaatacacttaccttccttagaaggggaaacattaacaaagagagctgtgctaggagcattgagccaagcacccatttctaaaaaatatgacattttaaaaatgaagtatctgctggacttcgtggtgcatacctttaattccagcacttaggagacagagacaggcagagtctttgtctgcatttatatctacacactagaagagggcatcagatcacatgcatctacagttgtagacaattttgagccatcatgtgggtactgaggtttgaactctgggcctcagcgagattgaccagtgtttttactactgcactaactggccagccccaccttttatttcttatggtagccctattcttatgacttctccaagacatcacatcttggctatcttttatcaaaagttttagcgccttccttgatataacacaaccacataaagaactctgccgtcttattctatgttgtagaaagaaagtgagagagagagagagagagagagagagagagagagagagaggaaagaaaggaaggaaagagagagagagagagagagagagagagagagagagagagagagagagagagagagagaaagagaaaggaagaaagaaaaagggaggaagggaggagaaagagaaagaaaagaaagaaaaaggaaggaaggaaggcaggcaagtataggtatnnnnnnnnnnnnnnnnnnnnttttagcgccttccttgatataacacaaccacataaagaactctgccgtcttattctatgttgtagaaagaaagtgagagagagagagagagagagagagagagagagagagagagagagagagagaggaaagaaaggaaggaaagagagagagagagagagagaaagagaaaggaagaaagaaaaaggaaggaagggaggagaaagagaaagaaaagaaagaaaaaggaaggaaggaaggcaggcaagtataggtatctgcttatggcggtttcttacataatttttgtttctgctctaagcatatgctttatcagagtaggacaggaaggcaggccacagtcatctgcctcccttgagttcatgtgcttcccacaaagggacagttttctcaactggtaaatttgaggtacaacacagatgtctttctgggtataaattgagtatcaggccttcatattaactcagtgtactctgtcatagcaggattctgaggaaaacttgattgataatagcatttgcctagattagcataaaccctaggagatgaaataataatcaaagatagagaaaatacaaagaattctggcatctcatttaatactgaagttttagtgtgagcctagtgtggctgcctctgtaaattagatttaatataaaaatgaagtcacagagattgcatctgcacagaaagaacagcagcagtttgttcaacttaagacctaagagtctttagcctgcctcggtggcctagacaggaagataaccacgagttagaggctagccttgccaaaagacaccagtcaggcctagagatccagcctcactgccacttgccttaccccagctccagtcccttggtttgcctttttaaatagtgatgctagctctctccttctactgtagagaggaacctcaaccccaaagcagcctgccttaagagaagagaagaagaaaaagtctctgctgcgtcagcagagccgcccagcacgttgccaggagcccatcctgggcttagtgagtctaccaaccctatgggtcatctgtaaacatcagccaggtgagtgtgggtctgagagggaggtataaggacatcacttcattttacagtggttagactgcagagcagcagctctctgtggtgggccatggtgattgtaaaggccacacataatttggtaaagttatgtaattgggaatacaatgatctatgggccttcctcttgtcttatcaaagccagtgtcattttagagcaattactgttcacattgtttgaacagctgatggctcataaagaagtgccaggtctgagtcggcatgtgttgtgtgctcatgctccaagaagaggacatcacagtgactcctttctcaaactgtccctgttcccaccctcgctccacattcttcttgtcataagtactgggttcgactcttttccatgactgtacacttccacctgggtccttggatggagattgtgagagcagctgctgtgctcttctagtcatgaattgagcacactctagaacccactgaatgtaaagatgtgaggcgataaacccaaagtagccctctttgctggagttttacttacaaaggcttagttgcaaagttaatatttaagaagctgatcaatgtgagctataattaaatatttcaaactagcattttaactagcatcatggattaagagaagaactggtaattttatttttaaaatgtttgggttttggtttttttgtttttgttgttgttgttgttgttgtttttggtttttttgttttgttttgtttttgagacagggctatactatgtaaccctctctggccctagaacttactctgtagaccaggctgcccttgaactcacagagatctgcctgcttctacctcccaagtgctgggattgagggcatgtgctgccactcccaaccatgacttcatgtttataaccagctttaagcattatataattattttcttatatttttcaacagatttaaaatagtagaggcaaatggatggaagcagaaattataccaaatatagtttctcattttgaggtaaaagtctggaaattgatagaatagttagtaagtaaactgctctttaatgtcagatttggtttatgccaccactcctaggatcaaattagactgcagtggaaaaggggaaaaggaagataggtcaacatgctggtagtcagttatcactgtaaccgcagcatcctggagggaacgcctaaaccactgcccacagatacctccagtcatcatgtagtcacagagtcctcaggcaagagcttgttaattcacacattctctaaaaggcaagccattgacctatattttatagaaaacagagtctaggaaagtaatgaatccatcttataaataaatgttggtgtctttcgataaaaacacaccactgtttctcagggcagaggtgagtttttaagttgataggtctagaagatcagtaatgagaaacagcttcatacaaagctcaagtgctgagcttccctcagactgaaaagaacttagagtcagcatcacactggacgcagaacctgtcttgttccctgtctactgtcgttctctcttagttacctccagatctttacctgttgtacttcctgctgcgttgggatctctagccttatctttctgtataatatggtaacattctcaccgagaggccgaggagatggctcagcggttataagtgcttgccatacaggctcgacagcctgagctcaagccccggtatccacatgatggaaggagaagcctacttctgcacattgtccttaggccaccacaggcatgcagtggcaaatgtgcttctgcacttgcactaatagtaacagtaatttagggaacgtacaaaaatatccaacaatttgccaccaatgtagaaccaagtaactttttttttaaagatttacctatttattatatgtgagtacgctgtagctgtcttcagacactccggaagagggcgttagatctcacggatggttgtgagccaccatgtggttgctgggatttgaactcaggaccttcggaagagtagtcggtgctcttaaccgctgagccatctcaccagctgttaccaaacagtattattgcctatcatctaataagaaagtggaaatatgatttttcctaattatattcctattataaaaggttgtaatggcattttcaggattattaaaatatacattgtaatgggaatgtatatgaatgtataaagtttgaactaataagataattacttaaaatcttttttttttcttctccccgagatagggtttctctgtacagccctggctatcctgtaacttgttctgtacatcaggctagtctcaattcacagagatctgcctgcctcagcctctggagtatggggattaaaagcatgcatcactaccgcccatctatttcttaaattctttagatatatacttagtgggaacctaccatggaccagcagctaagacttcataactttctgttgaggaaaaataaatataaaccattaacatgggtgggctgctgagtgggtggactctaaggtccggtattgccagctcacctgctcccaacatgagtttgcataattggctgactaagctgatgtacaaacttttaatggaaggttccctgtacacacacatggtaaaactcttgcaattacagacctagtccctttccttggaagtttcactttccatgattccagttacttagagccaacagtaatccataaacaatttgcaatgaaggctgggcatggtggcacatccttttcattccagcattctgaggcagatgcagggattatgagctctaagttaacctggtcttcatagcaaattctaagccagccagagatacgtgagaccctgtctccaaaaaggaaacatagacttataatgttatgtgctctgttttattgtttattgttgcccatgtactactatgcccaacttgtaaactttatcctaagcatttatgtatagggaaaaaaatcacggtgcaagtaagataatgtgcacagtttcaggcatccagtgaggatcttgggccatagcctttcagatcaggagggacttctgatacctaaaggctcttgagtaagtcacttgaactggcctagcgcaaacctaagtataatgaacaataactgggatttgtagagtaatgttatttttaataattgttatactttataatcaaatatactaactgtcctcttcctccctgtcacagttccagagtcatcagtaggctaaatagaaggtgacctctcctcataagatttggacaactcagattatctgaagacacaaacctggcaggagggagaagaaaaagcaaaacacttgaaaccagaaactcatatgtaatcctgtgatcaaagcaactggtcagcacttcatcagacgtgagcataggaagctcagcagagaccgtcggccgtgaggtgtttgcagcatatcactctgctgtaatcagtgtgtcgcttctgcacaatcagagactgtctcatctctccactcaacgtggaagttgccttgtgcctaaactgaattgacaaatgcattgtaactacaaattttatttattgttatggaactgtgaggtctacatataaagggaaaagttcatgtgggaagctgatgtacactcagctgatgccagcattgttaaagctgttcacagagcagtggcaaccattggcccttagcattcccggcatacctgttagtgtcttaaaaaggaagggagtcctttgttgccctctccgaccttcgccatatgaatagtgatttccatgaaataggaaaaatattacttcgtatagcatttctctcttgtttttttcactcatttttatttcctctttgtgggtgttatatttgatctgagtctgcatagtttatggtcacagtccagaaccctccttgcagtcctgtatgctttgttcatgtccttgaagtgataagcagacaccatctgtgaccatagcctagctaatattttgaaaggggaagttttgtcccctggatttgcccccaaataaacattgctttatttctaataatcactaagacttttcaggcttctaggtttcatagtaaagctataatagcaagaagtgtaacttacaagggagagtttactttttaggaattgctttgttttccgagcagtaagtactacacaatatagtacttgtaaagtgttagctgataagtaagcacagaatgcattcagtacaatacaaagatgacttttcctggtgagtctccgggacaggcagtgtgatgaatgcactcaaccgctctgaggctaattacctatggaatccaagagcaatggtcacggttccttaccctagctttacttctgtcctttgagttggctggtccgtggggggtttctgttgtcacattaatcctgggacagatccccactgagtgggagaaatcaactcttgggtcccatctatggcgagtgatatcccccactgaggcctctcttcttgacctgtggccctttccagactgatatctctatgcaagttgtataatcctcagtgtcccatgtcctgctgtccccatggtatatgctggtttcagagactctgcagtctgcgctgctccccactgtttagagctgtctcctcacaggcgtatttgtnnnnnnnnnnnnnnnnnnnnccagattagcaccgagctgtacctgtcagtctgtcttagcattatgcattaaggcaccctctgtctctaatcccttacagttgtttttaagacacagtaatcactttaaacttccatgaaatctgtcttccaccacagcaccctgggagagaaaaacatgctaagcgtgatggtcttggctaagtaactccttagagccaatagcagtggcagtctgcacagaagaaaaatcccaagtcgttctgtaacttagagacaccggagaattttgaaagaacaaaaaccatgaagacagcacttcagatcctccatcaggactctggtgaacacgtcagtctttggcgaacttagtggacttaatttgtatatgttctccagttagatcagactctatctgtggccttgttcttcatttcagtgttaatcagctaaaacagcagttgttgctatgatgtgtgagtgaacataagccactgcctggccttttttcttcagagcttgtcgtctttttcgctatattagactttgcagtatgcccagaagctttccttcataaaatagaaagaaaaaaacatttggcttatttttcactgtagctagtcttttatacaataatcttgtaagaaaatttcttgaattctaaatattactctttctagatttttgaaatcaaaagttttcagtaaaaagtttcttactttattttattatattaggtagttaaagaaaatgtagggttatttaccataacctgttcattaatatcagaaatttacaatagcattttaagagcatagtaggttctagcataccatgtagttcctatggagtattgtgagagcgaattgttggagatgagctgcttttcatcttgttctccagtttccattgttggtttattgcagatttgtattctgtgtcaaattcaaggtattattgataaaccttttcaaccagcagcaagaagttcaaatttcttttttctgtcgctgtaacagaaaacacagtatgtatataacatttatgtagcaataaatgtgccatccttttttttaacatagtaaactagtgagttttttacactcctgttttccacagaataatgtattttgttttctttttctatctccttcctcccagaaagtctggaactgcttttcctgtctgcactaattgtgcttcacgggtgaccctgcaggacagatggggctgggcaagctaagatgacacccccggccccgcacagctctactcttgccctctctactgacactgacctcttaagtcttttcctgaaggtcgagcaaacccgtgtcggtagtaaagaacatctcttcttgcagatctagagaagaatgaagacgatgggaaaggacccttaaagcattcacagctgtttcatgtctcttttctcttacctacaaccaaaaaataaataagcaagcaaacctgccaaaatagggggaggggggcagcattagtgaaagctcttccatctgttgttaacaccacatccatgcatgcatgtatacaaacatgtatgcattgactactgtgagggcttcatgggtagcctgagataggaaccacctggagctcctttgcacgaggaggctgagtcctctcaggatcttgacaaatcacatcttttgatggattttgaaattcgatttttatgtgaggcctaacagatcatcttgcttcttgtgtaatttgataagtataaatttagtagtttgatttcatactaaatgataaactaaaaactccatgcaggaagaaaatagttgatgtttgaagtaaggtgggatccagagagctagtcaccttgcctcattaacaggtttgtaagaaggagcccaggcacatcctgtgtccaagcccactgagagcaggtcaagacttaaaacttttctacaagccctacctgccttcaattctcttccctctgtgtagcttctaaggaacttgatttagtagtttcactttctatctatttcacccatttctctctggttcgtgaattatttttcttccttagaaattcaattgttttaaatagataccacggaaggtaggtgtgtgtgtgtgtgtgtgtgtgtgtgtgtgtgtgtgtgtgtgtgtgtgtttgtttagctaaagggtgttagttttggcatcagtcagttgattcagatccgagctcaacatctaattgattccatttccttatctggaaaatggagagctgttcaagagttatttaagtattgaatgaaacaatatatggaaagctcttacaatggtccctatcacatagtaagtactcaataaattatgaatattttttaaataaatagtatttcaaccagttcctgggtgattcctcttcagccacactgtggggagtgacttacagccccaggagatggcagactatctttgtgggaatctgcattcttctatggtcctccagcaaaagctagcacttctttccagtttccattcttgatttattggagatttgtttgtttgtttgtttgtagtttttcaaaacagagcttctgtctgtctccctgactgccctgaacttgcattgtagaccaaaagatctgcctgcctctgcctcctgagtgctgggattaaaggcatgtgcaccacagtggctgaagatttattatttaacattcatattccagtagagtaagcctataggctttgcccagtaccattgtaggatgggtagtgctgtcagtcagggttcccaggaagcagatgccaggggcaagtaaggagaattaaaggccatcacacagccctgtcatctagaagagtgagcaaggaggagggtaaagagccataaacaaatggtcacttgtctcctagaaaagcatgcacaaccctgcagaggttaacaacagagagatgcctaccgcaaaatggtgcctaggcctcaggcctctgaacactgcggccagctactacaacaggtacacagctaacagcaagcttccaaaagggtaacctcaaacagaggcctcgaagtcaagccaccatggcttccgacagctcctatacaactagcaaaacaaaaccaagggtcttcagaagtcactgtgaaggaagggtaccttaccaatctgatagtgctccaaaatacgcagtgctttttcttctgccactccatagccatggatctgtcagacctgtactcccatgggctctggtgagtaagccagtatgggtgctatgcttggtattctggagtccttccaaggacttgatcctctctgcctggtgaagagtagacagttcctgtctttgtagccacccgtgcgaagcctcttatttcctctctcgggttttccctgtgagtgcctcagtcctgtggttctgctgtagtctaggcatagtcacaggaaagtccactctagcatgtctgcataagggcttagtctctagcagcagcaccatatgcaataggtgtggaggtgcgtgcctctggaggtagaggcaggaggatctaaagttcaaggtcatcttcagctaacagtgactttgaagccagttaaggatgtgtaagaggccccatcaagttgcagatcacaaatgaacatacagaaaagtatccaagtttatatctattaacagctatttaaaaaaaaaaaaaaaaacagttcagcagctacaaaagataacccagagtacaggcccactatactctgaaaactgtaagacaccaaagaggcacaagaaaataacatgtttagtgtttgaaaaaactaatatcgttaatatgttcatactactaaagctatagaattgatataattcccaccaaaattccaaagatattttccagaaacagaaaaaaaaatcttaaaatttgaatggaaccatgaaagacgccaaataaaccaaagcagccgtggcttagtaggtaaggtacttggggacacacctgagaacctgagttcaggccccaggacccacatggtagaaggaaacaactcctgcaatttgtcctctggcttgcagatgtgcatcatggtataaccacccacacacctatattagagggtaatgctgtgtttttcttgtactttataatacaactttaaatggttatagagccacaaaagatccctaacaaccagaatgatcttaaacagaaagaacccatgtggaactatctacaaataatttaaaatgtctcacaaaccatagtaataaaacagaatgtgaagacatagaccctgcctcaaaaataatgaaatggtctggagagatggctcagtggttaagcactcatccctcttctagaggacccaagcttgatcagtagcatccatatggcaactcattatcatctaactccagttccagtgtgtccaatgttctcttctggccgccttggacactgcactcatggtacacagatacatagcaagcaaaacacccatacacacaaaatgaaaaacttaataattaaaaacaccagccaggcatggtagttgtacctccactaactccattgtttgggaggctaagacaggaggattggcagtttttagtttttattagggtgtgtatgtatgtatgggtatgtatgtgtgggtgcaggtatccttgaacagaggtgatgaatcccctgaagttgtagttagaggcagttgcaaaccccaacatggaatctggaaaccaaccttgggttctttgagaagcaggaagtactcgtaagcaccactaagccatctctagcctgagtctctgtttctttgttttgttgttgttttgagatctgaaatgacatacccctggctagcctgaaactcactgtgtagaccaggctggcctcaaattcagagatccctctgcttttgcttcccacgtgctggcagtaaagatgtgcaccaccatgcctggcagaccccaaatctttagaaacaaaaggtcagcaataaactgtgagcttggcatgtacaaggttaggactgggaaaaaaaggactctatcatataatcccacaatcccattgctggatatacatctaaagaaaatgaagggctggcaagatggctcagcaggtaagaccactgactgctcttccaaaggtcctgagtttaaatcccagccaccacatgatggctcacaaccactcataacaagatctgactccctcttccggtgcatctgaagacagctgcaatgtacttatgtataataataaataaatctttgggctggagcaaccagggactgagcaagggggacgggccagagccggcagaggtcctaaaaattgctacagtgtactcatatacataaaataaaataaataaatctttaaaaaagaaaaagaaatgaactttgtgcatggaagaaacacctgcatacctgtgtctacttcagcactgttgacaacagctaagacatgcaaaacacctaaatgtccaccaacaaatgagtaaaaaaaaaagtgtcacatgtacacaatggagcatttggtttaacaaaggagaaagtaaaccaaaaacttgtaacatgcaggctaaaaaagctgaacttagctacaaatacagaatagtgaagtaataattagctattagccagagggcccagaatttcagatgagagtaataagctcaaggggcttactaatatgtaacatgctaaatagctaataacagcatgtgtgttgcttattagcatacaaagaaatgggctccagggactgctgggatgtctggcaagagagcttgcctgctgacttcagttcaaaccctccaccccacaaggtgtaaggagagagccaagtcccacacgtcctagagttagtaggtgtgctgccgtgcttctctgcatgcccaaaataattgtttctatttaaaagtaagtttcaagctgggtgctggtgacatatgcctttaatctcagcattcaagaggcagagacaggtgatctctgtgtttaaggccatccttgcctacaaagcaagttccaagacagccaaggctacacagagaaaccctgtctttaaaaaataaaaaataaaaaaaaaggaaaaagtaagtttcattgtgacattctcatagtacgcccattagacctgttcccattgacacacacactaccctctgaccatcttctcaaactccaagacaatattccattctttcatggtgcatacattccttacacctctttctgccttctaatagtctgctttctactttcatgacccatcatggacgcacgcgtgcgcgcacacacacagagacaaacacacacttctagactggagagaagcccaaatttatgtttctgtctagcttttggcttttgattgacatgacccctagctccatccattttttttttctgcaagtgtgacaattttacttttatttaagactgaataaaatttcgagtaccgggtatggtggtgcacacctttaatcccagcacccaggaggcagaggcaagcaaatctctgtgagttctagaccagcctagcctattaagtgaatcccagaacagccattgctacacagagaaaccctgtctcaaaaaaaaaaaaaaaacaagaagcccattgtgtgtatacagtacatgctcttcatcagttcagatgtattattgtccttgcatttgacatggcgtctcatgtaacccaggctggcctaggacttgatatgttagtcaaagctatcctttgactcctcctcttgcctcagcaaccccccacccatcccccagtgctgagattacaggcatgtagctccttttcattcatctattgattgataaccagcctagttcttagctattatgtataatgcagcaataaggatacatatctctggtatagtatatagatttttaggtattctcgctaaaaaaaataagcatatgaaataatatgctaattagctcaattgagccattttataatgcattcatatttcaaagcactttcagtaattgtgtacaaattttacttgtcaattaaaacatttaaacacattattattttttttttttttctgagacagggtttctctgtatagccctggctgtcctggaactcactttgtagaccaggccggcctcaaactcagaaatctgcctgcctctgcctcctgagtgctgagattaaaggcgtgccggctcaggctgctgaagttcttaagccatcctggcttcctgcaggttgcacctttcgattaccggtgctcttagatttctgacttcctctaaatttccgtaggaaacagatggtgtattttcccctctgcaggcaaaagccaccttcaagtctggagattaagcctaaagatcccccaagtgacagcaagaatattctggaagctttaaccaaaccagtctcctgctttcagaggttcttcctccctattcctaagagccttctactctaaggttcctccatctccctggccttctgaagccatggtctttgtggggctaatgtgcagccctggcagggcctcttctcttgttcttaccaactgttaggatgtttttatccctcaccttcctaatagttttgttgatcaccctcatagatggtacctgtagcagtccagtaatgaagttgtatccccatccccccaaacagatccccaaggccttggacattagatatctctgccttgtggggcccacctcataataaagtagccttgaaaagcaggttccccagaggttctctacctcccagcccagttctcccaattcctctcttgtcgggccaggtgccctgccctctggcctccgtccaagccccagggccatcctgccctgtcctcattaaagcgtgaaaggctttacgactctgagcagaaggttattgatcaaaactgatagcaggagtagcttgatccccctaactacagagattaattagcttgattcccaagcataattcttaattaggcacaggaagaaaggaaaaaaacacaaagcgactattcttcctccaaggactgctgaccttctgtccagggtgaagagggaggagccggaagtgggaggcaggaccaggtaaacatgtcctagcaccttaatgcttcctgctgggtccaaacctgtgcagttcatgtggacttgtgtgcttctcttgttttgcttcactcctggcccctcatgcacagaggccaaatcaaggcccatgttttgacattcctactctctatacacatgtctctagagaattcagtgtcctgaaacttgccgagaacccccaaaatggagacgtttcctgcagccaggaagtagaaactttgtaacatttttgagctatgcccaactcttttaccaatggtgatttccggggtgggaggcaactggggtagaaaggagatgtgatttagcaacccatcagctgaccagactatgagcttcttcaagatagctgtgctgactactgaggaggtacgtgacacatagtaggttcatggggcatagtaggaacttccaattcctcccctctaaagaaagcaaaccaaggaagtaacatatcagaagatgaattccaagtgatgaattcactagcacatagataagagagtgtgtgttaggtgtgtgctgacccaggatttctgcaatcaaatcacacagtgaacatagatgaagtatacaggctgctggcagtgtaacctggggggagacagaggacttggctacagaacacttaggaccctggcctgggctcactgccagaccaggggcagacctgagtcctgggtgacattctgtctagaaaacagttagaaagcagtgggttgtgggtgtggaaccagtgttaaggtcactggaaggccttgacataggtaggaagttagagctgtcagaaatgaccagtatgctctgcccagtgactcacatctccactcacatctccaccaaagcacgcacagcctctctgtggacacttgatccaaacaaccactggggcagtgtggaccctgacctggtggacgcttgaagcgttcagaaattgtaagatgtcatgggggagagcttgtttagctacaagtctggtcttgtacaggtatggactgaagagtctgaagacctcgtggtaggaagtgtggaactcatgtatggggtggtgttagggatgatggaaatgtaggagagatgcaaatgaaactggactgggtattgtcccttgttaagctgggtgggagtcattatcatgacttcagaaaatgtgtgagattttcttcacagtgaatggtggaagtacttaaacaggaaaggactctgcattctttcctgacttcgtacttcaggggatgagacactggtctctactcagccagacaaatacgcctgtgaggagacagctct

SEQ ID NO: 2336 - DNA, 3006 bp, Mus musculus
gtgaactttaatcgggaaggttggatgcggagcccgggcggcaggacctgctagaagtggctgaagatgaatccccagcagcagcgcatggccgcgatagggaccgacaaggagctgagcgacctgctggacttcagtgcgatgttttctccacctgttaatagtgggaaaacgagaccaacaacactgggaagtagtcagttcagcgggtcaggtatggatgagcgtggaggaacaacatcttggggaacaagtggtcaaccaagcccctcctatgattcatctagaggttttacagacagccctcattacagtgatcacttgaatgacagtcgattaggaacccacgaaggcttgtccccaacacctttcatgaactcaaatctgatagggaaaacatcagagagaggctcattttccctgtacagcagagactctggactctcaggctgtcagtctagtctcctgagacaagatctaggacttgggagcccggcacagctgtcttcttcaggaaagcctggaacaccatactactcattctctgccacaagttcgagaagaagaccgctccatgattctgtagccctagatcctttacaagcgaagaaagtaagaaaggtgcctcctggcctaccttcttctgtatatgcaccatccccaaattctgacgatttcaaccgtgaatctcctagttacccatctcccaagccaccaaccagtatgttcgctagcactttctttatgcaagatgggacccacagttcttctgacctttggagttcatcgaatgggatgagccagcctggttttggtggaattctggggacctccacatcccacatgtctcagtccagtagttatggcagccttcattcacatgaccgcttgagttatcctccacactcagtgtcaccaacagacataaacacaagtcttccgccaatgtccagcttccaccgtggtagtaccagcagctcaccatatgttgccgcctcacatactcctcccatcaatggatcagatagcatcctaggaaccagagggaatgctgctggaagctcacagacgggtgatgcacttgggaaggccttggcatctatttattcccctgaccacacaagcagtagttttccatcaaacccatcaacaccagtgggatctccttcacctctcacaggtaccagtcagtggcccagagctggagggcaagctccttcatctccaagctatgaaaactcacttcactccctgaaaaatcgagttgagcagcaacttcacgagcatttgcaagatgcaatgtccttcttaaaggatgtctgtgagcagtctcgaatggaagaccgcttagacaggctggatgatgctatccatgtgctacgaaaccatgcagttggaccttctaccagtctgcctactagccacagtgacatacacagtttgctgggaccatcccataatgcatcaattggaaacctcaattcaaactatggaggatccagccttgttacaaatagtcgatcagcttcgatggtcggaacacatcgggaagattcagtcagtctcaatggcaatcattcggtcctgtctagtactgttgctgcctcaaacacagaactgaaccataaaacaccagaaaatttcagaggtggtgtacaaaatcagtctggaagtgttgttccaacagaaatcaagactgaaaacaaagaaaaagatgaaaaccttcatgaacctccttcatcagatgacatgaaatcagatgatgagtcctcccagaaagacatcaaggtctcatctaggggcagaacaagcagtaccaatgaagacgaggatctgaatccagaacagaaaatcgaaagggagaaggaaaggcggatggctaacaatgccagagagcgcctgcgcgtgcgggatattaacgaggcgttcaaggagcttggccgaatgtgtcagcttcatttgaagagtgaaaaacctcagacaaaacttctcattcttcatcaggccgtggcagtcatccttagtctagaacagcaagtgagagagaggaacctcaaccccaaagcagcctgccttaagagaagagaagaagaaaaagtctctgctgcgtcagcagagccgcccagcacgttgccaggagcccatcctgggcttagtgagtctaccaaccctatgggtcatctgtaaacatcagccagttccagagtcatcagtaggctaaatagaaggtgacctctcctcataagatttggacaactcagattatctgaagacacaaacctggcaggagggagaagaaaaagcaaaacacttgaaaccagaaactcatatgtaatcctgtgatcaaagcaactggtcagcacttcatcagacgtgagcataggaagctcagcagagaccgtcggccgtgaggtgtttgcagcatatcactctgctgtaatcagtgtgtcgcttctgcacaatcagagactgtctcatctctccactcaacgtggaagttgccttgtgcctaaactgaattgacaaatgcattgtaactacaaattttatttattgttatggaactgtgaggtctacatataaagggaaaagttcatgtgggaagctgatgtacactcagctgatgccagcattgttaaagctgttcacagagcagtggcaaccattggcccttagcattcccggcatacctgttagtgtcttaaaaaggaagggagtcctttgttgccctctccgaccttcgccatatgaatagtgatttccatgaaataggaaaaatattacttcgtatagcatttctctcttgtttttttcactcatttttatttcctctttgtgggtgttatatttgatctgagtctgcatagtttatggtcacagtccagaaccctccttgcagtcctgtatgctttgttcatgtccttgaagtgataagcagacaccatctgtgaccatagcctagctaatattttgaaaggggaagttttgtcccctggatttgccccc

SEQ ID NO: 2337 - protein, 696 aa, Mus musculus
KWLKMNPQQQRMAAIGTDKELSDLLDFSAMFSPPVNSGKWTTLGSSQFSGSGMDERGGTTSWGTSGQPSPSYDSSRGFTDSPHYSDHLNDSRLGTHEGLSPTPFMNSNLIGKTSGSFSKRDSGLSGCQSSLLRQDLGLGSPAQLSSSGKPGTPYYSFSATSSRRRPLHDSVDPLQAKKVRKVPPGLPSSVYAPSPNSDDFNRESPSYPSPKPPTSMFASTFFMQDGTHSSSDLWSSSNGMSQPGFGGILGTSTSHMSQSSSYGSLHSHDRLSYPPHSVSPTDINTSLPPMSSFHRGSTSSSPYVAASHTPPINGSDSILGTRGNAAGSSQTGDALGKASIYSPDHTSSSFPSNPSTPVGSPSPLTGTSQWPRAGGQAPSSPSYENSLHSLKNRVEQQLHEHLQDAMSFLKDVCEQSRMEDRLDRLDDAIHVLRNHAVGPSTSLPTSHSDIHSLLGPSHNASIGNLNSNYGGSSLVTNSRSASMVGTEDSVSLNGNHSVLSSTVANTELNHKTPENFRGGVQNQSGSVVPTEIKTENKEKDENLHEPPSSDDMKSDDESSQKDIKVSSRGRTSSTNEDEDLNPEQKIEREKERRMANNARERLRVRDINEAFKELGRMCQLHLKSEKPQTKLLILHQAVAVILSLEQQVRERNLNPKAACLKRREEEKVSAASAEPPSTLPGAHPGLSESTNPMGHL
